United States Patent Application Publication US 2025/0236838 A1 - sequence listing, part 5

SEQ ID NO: 2 - DNA, 5413150 bp, Escherichia coli (residues 1,804,385-3,608,768 of 5,413,150)
  source 1..5413150: mol_type = genomic DNA
caatggtaggtctgtctcttgtcggttgtgttaataacgacaccctgtcaggggatgtttataccgcttctgaagcgaaacaagtacagaatgtcagctatggcaccatcgttaatgtacgtcaggtacagattcagggcggtgatgattccaacgttatcggcgcaattggtggtgctgtacttggtggtttcctgggaaatactattggcggcggaaccgggcgttctctggctactgcagcaggggctgttgcaggtggtgtagccggtcagggcgtacagagtgcaatgaacaaaacgcagggtgtcgagctggaaattcgtaaagatgatggcaacaccatcatggtggtacagaaacaagggaacactcatttctctccaggccaacgtgtcgtactggccagcaatggcagtcaggtgaccgtttccccgcgctaaataagtttgcgtgtggtcaggttactgaccacacgcccccttcatttcaccctttggcctgtaactcaatgatattatgctcaagttttgcgatgagcttaatcagttgttccagttcctctgcggagatgccatgtaaaatttccgcgcgggttttgttaataacggcttccatttcgctgatcaatggctctgccttttccgtcagtttaatacgtttagcccgacgatcgctggcacaagtttgacgcgaaattaaccctttttcttccagttggtccagcgtacggaccagtgatggctgctcgatgccaatcgcttttgccagttgaatttgcgactggtctggaggtaactgatggatattgtgtaacgtaacccaatgggtttgtgttaactccagcggtttcaggcgatggtctatcagagcacgccatatgcgcaccaaccgtgccagatcagaacctagtggcgattccaatttcatctccttataattagcttgctaagatattatgcggcttttagaatagtgtgcagcaattgtattgctaaaacaaatgtattgctgcatttggttaccgtcagacatatttttcagaaattgcgcgtaaatttttcgcacttaaagaatatttattaatctaacgcaatatattctgtcgtaaaggaatctactttgtgaagtttatgctcaatgcaacaggattgcccttacaagatctggtgttcggtgcatccgtctactttcctccgtttttcaaagccttcgcgtttggattcgtcatctggcttgtcatacaccgcctgcttcgtggctggatctacgctggtgacatctggcatcccttgttaatggatttatcgctgtttgcgatttgcgtttgccttgctctggcaatactgattgcgtggtaactatgtcaattaaaacaattaagtatttctcaacaatcattgtagcggtagttgcggttcttgccggatggtggctgtggaattattacatgcaatctccgtggacacgcgacgggaaaatacgcgcagaacaggtttctatcaccccacaggtgtcgggacgtattattgagctgaatataaaagacaaccagctggttaacgcgggggatcttctgctcacgatcgataaaacgccctttcagatcgccgagctgaacgcacaggctcagctggcgaaagcgcaatctgacctcgcaaaagccaataacgaagcgaatcgtcgtcgtcatctctcacaaaattttatttctgccgaagaactcgataccgctaacctcaatgttaaagcgatgcaggccagcgttgatgccgcacaggcgacgctgaaacaggcacaatggcaactggcacaaacggaaattcgcgccccggtgagtggatgggtgactaatctcactacccgcatcggcgactacgctgacaccgggaaaccgctgtttgcccttgtcgacagccactcgttttacgtcattggttattttgaagaaaccaagttgcgccatatccgcgaaggtgcaccagcacaaattaccctctatagtgataacaaaacgttacagggtcacgtgtccagtatcggtcgggcgatttatgatcagagcgttgaaagtgactcaagccttattccggatgtgaaacctaacgtcccctgggttcgcctcgcccaacgcgttcccgtccgctttacgctggataaagtcccaggcgatgtcacgctggtgtcgggcaccacctgtagcattgccgtaggtcaataatgaacgcatcgtcatggtccttgcgcaatttgccctggttcagggccacgctggcgcaatggcgttatgcgttacgcaataccattgccatgtgtctggcgctgacggttgcctattatttgaatcttgatgagccctattgggcgatgacctcggctgcggtggttagctttcccaccgttggcggtgtcatcagcaaaagcctcggacgcatcgctggcagtttgctcggagccattgcggcactgcttcttgccggacatacgctcaatgagccgtggttttttctattgagcatgtcggcgtggcttggcttttgtacctgggcctgtgcgcacttcacgaataacgtcgcgtatgcatttcaactggcgggctacacggctgccatcatcgcctttccgatggttaatattactgaggccagccagctgtgggatatcgctcaggcgcgtgtttgcgaggtgatagtcggtattttgtgcggcggcatgatgatgatgatcctgccgagcagttccgatgctacagcccttttaaccgcattgaaaaacatgcacgcccgattactggaacatgccagtttactctggcggcctgaaacaaccgatgccattcgtgctgcacatgaaggggtgattgggcagatactgaccatgaatttgctgcgtatccaggctttctggagccactatcgttttcgccagcaaaacgcacgccttaatgcgctactccaccagcaattacgtatgaccagtgtcatctccagcctgcgacgtatgttgctcaactggccctcaccgccagatgccacgcgagaaattctcgaacagctgctgacggcgctcgccagttcgcaaacagatgtttacaccgtcacacgtattatctccccactacgcccgaccaacgtcgccgactaccggcacatcgccttctggcagcgactacgttatttttgccgcctttatctgcaaagtagtcaggaattacatcgtctgcaaagcggtgtagatgatcgtgccagactcccacggacatccggcctggctcgtcataccgataacgccgaagctatgtggagcgggctgcgtacattttgtacgttgatgatgattggcgcatggagtattgcttcgcaatgggatgcaggtgccaatgcattaacgctggcagcgattagctgcgtactctactccgccgtcgcggcaccgtttaagtcgttgtcactgctgatgcgcacgctggtgttactttcgctattcagctttgtggtcaaatttggcctgatggtgcagattagcgatctgtggcaatttttactgtttctctttccactgctggcgacgatgcagcttcttaaattgcagatgtccaaatttgccgcactgtgggggcaactgattgtttttatgggttcgtttatcgctgtcactaatccccccgtgtatgattttgctgattttcttaacgataatctggcaaaaattgttggcgtcgcgttggcgtggttagcgttcgccattctgcgtccaggatcggatgctcgtaaaagccgccgccatattcgcgcgctgcgccgggattttgtcgatcaactaagccgccatccaacactgagtgaaagcgaatttgaatcgctcacttatcatcacgtcagtcagttgagtaacagccaggatgcgctggctcgccgttggttattacgctggggtgtagtgttgctgaactgttctcatgttgtctggcaattgcgcgactgggaatcgcgttccgatccgttatcgcgagtacgggataactgtatttcactgttgcggggagtgatgagtgagcgtggcgttcagcaaaaatcactggcggccacacttgaagaattacagcgaatttgcgacagccttgcccgtcatcatcaacctgccgcccgagaactagcggcaattgtctggcggctgtactgctcgctttcgcaacttgagcaagcaccgccgcaaggtacgctggcttcttaattacttaattacaccacaggcatagcgttcaccgccaccgcccagcggtttgggttgatcggacatattatcgccgccaacgtggaccatcagcgctttgtctttgacttcatccagtgatttcagacgaggcgcgatgacggcatcggtcgccttgccgtcattattgactaccagtgcaggcagatcgcctaaatgcccggcaccttctggcccttcatgtttaccggtattttgtggatcaagatgcccgcctgcggattctgcggcgctggctttgccatctttggtggctggctggcagcttcctttggcatgaatatggaagccatgttcaccgggaggtaatgctttcagatcgggcgaaaactccagacctttatcggtttcagtaatggtgacgctaccaattgactgcccaaccccttgcgacgtgacgaggttcatctcgactttttcactggcagcttgtgcgccggtcgcaacaaccagcgccagaatggccagactaaaacgtttcataggacctccgttcattgtgcattcctgaataagtgtaaaccagtgacacatttttgaacggcggctattcctaaaagtgcttacggtacgtcgtaacctagtgccgctttacggatacgaaaccattgttgacgggtcattttcagtgtttctgcttcgacagctgcccgtacgcgctcaattttacctgagccgataattggcagcggctgcgacggtaaacgtagtacccaggcgtaaactacctgttcaatcgagcccgcgtttaactcctctgccaccacagccagttcatcacgcagcggctggaaataatcatcattaaacagacgaccaccaccaaggcaggaccacgccatcggacgaatacgcagttgttgcagttggtcgagcgtgccatccagcagtaacggctgatgcaccggggatatttccacctgattagtggcaagagtaaatggcaggcgtgattgcaacagcgcaaattgcgcaggtgtaaagtttgatacaccaaaatgacgcactttgccgctctgatgcagatgtttaaaggcgtccgccacttcatcggcatccattaacgggtctggtcggtggattaacagcagatccagatgatcggtcgcgagattaattagcgactgttcggcgctcttaatgatgtgatcgcggtcagtgatgtaatggccaatgacgttttcttcacacgcggtcgtcgcgataccgcatttactgacgatttccatccgttcacgcaggtgaggtgccagtttcagcgcctcgccaaacgccgcttcgcactgatagccaccataaatatcagcatggtccacggtggtcacgccgagatccagatgctcttcaataaaactgaccaactggcgggcggacatgttccagtccatcaatcgccagtagcccatcacaaaacgggaaaactccgggccttgcggcgcaatagtaatacgctgaaccataatcgcttcctcttatcagatatgagaggagtatacgcaagattagggtcaaaagagtgatggttgctccggttcgtctgatggcgctggcttatttacacgtaatttgcgcattaatcgctgccgacaaaggcgcaacacttcttgtttttcgccatcgctcatcttattccagttaaaacgctcatcccggctacgaaaacagccgcgacaaaatccccgttcgtcagactggcaaattccccggcacgggctctggacgggaaagaactctaattgctccgtcacctcgccctcctcagataagattattaccattattgaagctgttaatgtccaaagtagcaactttgcttgcactagaccgactggtctactacactccaacgcatgaacaaacacaccgaacatgatactcgcgaacatctcctggcgacgggcgagcaactttgcctgcaacgtggattcaccgggatggggctaagcgaactcctaaaaaccgctgaagtgccgaaagggtccttctatcactactttcgttctaaagaagcgtttggcgttgctatgcttgagcgccattacgccgcatatcaccagcgactgactgagttgctgcaatccggcgaaggtaactaccgcgaccgcatactggcttattaccagcaaacactgaaccagttttgccaacatggaaccatcagtggttgcctgacagtaaaactctctgccgaagtgtgcgatctgtcagaagatatgcgcagcgcaatggataaaggggctcgcggcgtgatcgccctgctctctcaggcgctggaaaatggccgtgagaaccattgtttaaccttttgtggcgaaccgctgcaacaggcacaagtgctttacgcactgtggcttggcgcgaatctgcaggccaaaatttcgcgcagtttcgagccactggaaaacgcgctggcccatgtaaaaaacattattgcgacgcctgccgtttagcaggcattttttatcaccagacgaccgggagcctttatgtcatctgaaaaactgtattccccactgaaagtgggcgcgatcacggcggcaaatcgtatttttatggcaccgctgacgcgtctgcgcagtattgaaccgggtgacatccctaccccgttgatggcggaatactatcgccaacgtgccagtgccggtttgattattagcgaagccacgcaaatttctgcccaggcaaaaggatacgcaggtgcacctggcatccatagccaggaacaaattgccgcatggaaaaaaattaccgctggcgttcatgctgaaaatggtcatatggccgtacagctgtggcacaccggacgcatttctcacgccagcctgcaacctggcggtcaggcaccggtagcgccttcagcacttagcgcgggaacacgtacttctctgcgcgatgaaaatggtcaggcgatccgtgttgaaacatccatgccgcgtgcgcttgaactgggagagattccgggtatcgtcaatgatttccgtcaggccattgctaacgcgcgtgaagccggttttgatctggtagagctccactctgctcacggttatttgctgcatcagttcctttccccttcttcaaaccatcgtaccgatcagtacggtggcagcgtggaaaatcgcgcgcgtctggtgctggaagtggtcgatgccgggattgaagaatggggtgccgatcgcattggcattcgcatttcgccaatcggtactttccagaacacggataacggcccgaatgaagaagccgatgcactgtatctgattgaacaactgggtaaacgcggcattgcttatcttcatatgtcagaaccagattgggcgggaggtgaaccatatactgatgcgtttcgcgaaaaagtacgcgcccgtttccacggtccgattatcggcgcaggtgcatacacagtagaaaaagctgaaacgctgatcggcaaagggttaattgatgcggtagcatttggtcgtgactggattgcgaacccggatctggtcgcccgcttgcagcgcaaagctgagcttaacccacagcgtgccgaaagtttttatggtggcggtgctgaaggttacactgattacccgacgctgtaatccaacattgcgagcggcgcaaagccgccgctatactaaaacaactttttgaatctgttagccattttgaggatataaagatgcgtcttcttcataccatgctgcgcgttggcgatctgcaacgctccatcgatttttataccaacgtgctgggcatgaaactgctgcgtaccagcgaaaacccggaatacaaatactcactggcgtttgttggttacggcccggaaaccgaagaagcagtgattgaactgacctacaactggggcgtggataaatacgaactcggcactgcttatggtcacatcgcgcttagcgtagataacgccgctgaagcgtgcgaaaaaatccgtcaaaacgggggtaacgtaacccgtgaagcgggtccggtaaaaggcggtactacggttatcgcatttgtggaagatccggacggttacaaaattgaattaatcgaagagaaagacgccggtcgcggtctgggcaactaatctcctgccgggcgtgaactcatcgcgcccgcatctttactgcatcgacaagtaatatttgtcataatgcgcgctgcaatttatccgtattaagagaatcagatgtccgataacgctcaacttaccggtctgtgcgaccgttttcgtggtttttatcctgttgtgatcgatgttgaaacagccggatttaacgccaaaaccgatgcgctgcttgagattgccgccatcaccctgaaaatggatgaacaaggctggctgatgccggacaccacattacatttccacgtcgaaccatttgtcggcgcaaatttgcaaccagaggcccttgccttcaatggcattgatccgaacgatcccgatcgcggcgcggtcagcgagtacgaggcgctgcacgaaatttttaaagttgtacgtaaaggtattaaagcgagcggctgtaaccgcgccattatggtggcgcacaacgccaatttcgatcacagctttatgatggccgccgcagaacgcgcctcactgaaacgtaacccgttccaccctttcgccacttttgacactgctgcactggccgggctggcactcggacaaaccgtattgtcaaaggcttgccagaccgctggcatggacttcgacagcacccaggcgcactccgcgttgtacgacaccgaacgcactgctgtgctgttttgtgaaatcgtcaaccgctggaaacgtctgggaggctggccgctacctgccgccgaagaggtgtaatcgagtcgatgcctgatgacatgcaatgattcaggcatctatagtgaggctattccacgcatcatgcatgatattcacggggaatagcgttaatggcaaataatccaaacccttcatcgcccctgccggacgtgttttcaccggcgacccgcgactggtttcttcgcgcctttaaacagccgaccgctgtccagtcgcgaaccacggctgcgctttacgctaacagaagtgaatgacctaccggtccggcaaacgccgatgtttacgctgttacgtgaggcgggattttcaagttcgccacaagggctggattggggatagagaaaggactgacggatgcccgttcgcatccgtcagtattgcaggacggattattccgcgtccggctcttcagacttgtatttagcggcagtttctttgatcagctgctgcagttcaccacgctgatacatttcgatcacgatatcacaaccgcccaccagctcgccgtcaacccacagttgcgggaaggtcggccagttcgcatatttcggcagttccgcacgaatgtccggattctgcagaatatcaacataggcaaaacgttcgccacatgcggcaagcgcctggactgcctgggcagagaaaccgcagctcggcagtttcggtgaacctttcatgtacagcaggatcgggttttcagcaatctggcgttggattttttcgatagtggtgctcattgtcttgcttcctcaaacttctttacggcagtaatctgacattgtagcgggtcagtgcggcatcggaaaataacattttcatcacgcttttgctattttatccctttgctctatttgttgcatttcaaatattcgtttcttccctgatgcacggcaaactggcgtatttataaccatttttagctttcactgctgcatttttttgcgctcgccgacgaaacgtattttttaacaataaaagctattaactttctcttcttctatgcattagaatcatcaagttttgtaaatcagacgcaggcatgatagacctgccttaacagagggacgctcagtggcgcggataaaccgtatttcgatcacgctctgtgctttactttttaccaccctgcctttaacgcctatggcccatgcttcaaagcaagccagggagagttctgctaccactcatatcaccaaaaaagcagataaaaagaaaagcacggcaaccacccaaaagacccagaaagccagccagaaaacagcgaaaaaagccgccagtaaaagtacgaccaaaagcaaaaccgcttcttccgttaaaaaatcttccattaccgcttctaaaaacgccaaaactcgcagcaaacacgccgtcaataaaacggcctcagccagctttaccgaaaagtgtaccaaacgtaagggctataaatcgcattgtgtgaaagtcaaaaatgccgcgtcaggaacccttgccgacgcgcacaaagcgaaggtgcaaaaagccacaaaagtggcaatgaataaactgatgcagcaaattggtaagccatatcgttggggtggcagttcaccgcgtaccggttttgattgcagcggtctggtttattacgcttataaagatttggtgaaaattcgtattccgcgtacggcgaatgaaatgtatcacctgcgcgatgcagcgccaatcgaacgtagtgaactgaaaaacggcgacctggtcttcttccgtactcagggacgcggtacagccgatcatgtcggcgtgtatgtcggcaacggcaaatttattcagtcaccgcgcacgggccaggaaattcaaatcacttctctcagtgaagactactggcagcgccactatgttggcgctcgccgggtaatgaccccaaaaacacttcgctaaaactttaccctgttgttacggcaacagggtaagttcatcttttgtctcaccttttaatttgctaccctatccatacgcacaataaggctattgtacgtatgcaaattaataataaaggagagtagcaatgtcattcgaattacctgcactaccatatgctaaagatgctctggcaccgcacatttctgcggaaaccatcgagtatcactacggcaagcatcatcagacttatgtcactaacctgaacaacctgatcaaaggtaccgcgtttgaaggtaaatcactggaagagattattcgcagctctgaaggtggcgtattcaacaacgcagctcaggtctggaaccatactttctactggaactgcctggcaccgaacgcgggtggcgaaccgactggaaaagtcgctgaagctatcgccgcatcttttggcagctttgccgatttcaaagctcagtttactgatgcagcgatcaaaaactttggttctggctggacctggctggtgaaaaacagcgatggcaaactggctatcgtttcaacctctaacgcgggtactccactgaccaccgatgcgactccgctgctgaccgttgatgtctgggaacacgcttattacatcgactatcgcaatgcacgtcctggctatctggagcacttctgggcgctggtgaactgggaattcgtagcgaaaaatctcgctgcataataactgatggcaaatgcaacattatctgatgcgcttcgcttaccatgccaacgcggatgaggcgttaacagcgcattcggcaagataaatcgcacgttgccagcaactgtaacgcagaaggttatccttctgcgtttttgtttaattagctgttggcaacgcaaactgcttcaggttgttttctggctgacataaacaccagcaataatgccagtcccgcgacaatcgcccccatcaccggcacaaaactgtatcccagcccagcggaaattaccgcaccaccagcagctgctcccagcgcatttccaagattaaaggcaccaatattgactgatgaagacagacctggcgcttcactggcgacacgcatcacgcgcatctgtaacggcggtacgaccgcaaaggttgcagctccccacaccaccatgctaatagctgcgccgaactcattgcgggccaggaacgggattgccagcataatcaccatcagcagcaacaaaaagcctttcaacgtgccgttaactgaacgatctgccagtttgccgccgagatagttaccgatagagaatccgacaccaatcagcaccagcattgccgtgacgaacaccggtgtggcgtgggtaatgctttgcagtaccggagagatataggtgtagagggtaaacattgcaccagcgcccagcaccgtcgtcagcaatgcagacagcacctgcggacgcattaataccgccagctcttttttcacttcaggtcgcgcccctgcgccacctttaggtaatgagaggaacagacttaccattgaaatcacgcccagccccgctgttgccagaaatgacatccgccagccgatggtttcgcccaaccaggtcgccgccggcacgccaccgatatttgccagggttaaccccataaacatagtggcaactgcgctagcctgtttatgttttggcactacgcttgcggccacgactgaacccaaaccaaaaaatgccccgtgattcaggctggtcaaaatgcgtgaaagcatcagggtcatataatccggcgcgatggcggaaagtacgttgccaagcgtgaaaatcgccatcaggaaaatcaacgcactgcggcgggcacgatgagaaagtagaagcgtcatcagcggcgcgccaaccattacgccaactgcataagcactgattaacattccggcagcgggaatcgagacatccacaccgcgcgcaatgacgggcaacaagcccattggcgagaactccgttgtcccgataccaaacgcgccaatcgccagcgccagcaacggatagttaattttcatgccttatctccacctcttcgcgtcattacgcgatattcattaaagtggcgaaagcatgacagtaatcacaaaaaaatgaaaataacaaaaagagaaaacacttttgccattttgctaacaaacaggaaggagatgcgagggagaacgcgctccctcgagaggaaatcagtgcagcgcggcagtcaaacccacggccacgatcaaaccgaggacgataatcgttgttaccagtgaaaatttaaggtcggtgctcatcaagttttctccttttttattaccacacaaaaagtgatattacgcatttttacacactgtgatgaaaaaatctcccgtcatttataatgataagtgtttttactacttccccttttcgtcaagatcggccaaaattccacgcttacattatttgcgtactggccattgaccccttcctgacgctccgtgtcgtttttccggcgtaccgcaacatttttgttgtgcgtaaggtgtgtaaaggcaaacgtttaccttgcgaatttgcaggagctgaagttagggtctggagtgaaatggaatggcaacaataaaagatgtagcgaaacgagcaaacgtttcaactacaactgtgtcacacgtgatcaacaaaacacgtttcgtcgctgaagaaacgcgcaatgccgtgtgggcagcaatcaaagaattacactactcccctagcgcggtggcgcgtagcctgaaggttaaccacaccaagtctatcggtttgctggcgaccagcagcgaagcggcctattttgccgagatcattgaagcggtcgaaaaaaattgcttccagaaaggttacaccctgattctgggcaatgcgtggaacaatcttgagaaacagcgggcttatctgtcgatgatggcgcaaaaacgcgtcgatggtctgctggtgatgtgttctgagtacccagagccgttgctggcgatgctggaagagtatcgccatatcccaatggtggtgatggactggggtgaagcaaaagctgacttcaccgatgcggtcattgataacgcattcgaaggcggctacatggccgggcgttatctgattgaacgcggtcatcgcgaaatcggcgttatccctggcccgctggaacgtaacaccggcgcaggccgccttgccggttttatgaaggcgatggaagaagcgatgatcaaagtgccgcaaagctggattgtgcagggtgactttgaacctgaatccggttatcgcgccatgcagcaaatcctgtcgcagtcgcatcgccctactgccgtcttctgtggtggcgatatcatggcaatgggcgcactttgtgctgctgatgaaatgggtctgcgcgtgccgcaggatgtttcgctgatcggttatgataacgtgcgcaacgcccgctattttacgccggcgctgaccacgatccatcagccaaaagattcgctgggcgaaacagcgttcaacatgctgttggatcgtatcgtcaacaaacgtgaagaaccgcagtccattgaagtgcatccgcggttgattgaacgccgctccgtggctgacggcccgttccgcgactatcgtcgttaatcacccgttgcgggagtctcttccggctcccgcagccactccttattcagcgtctcactatcgccgagatactcaagcaaccaggttaacgcaggcgacatatcattttgctgccatgtcagacaacatgccgaatccgggaaggggttttccagttctagtgctacccacttcccctcattaagccacggtttggcgaaatgtgttggcaccatccctatgcataatcctgccgagatacaggttgccgatgattcccagtcaggcacgacaagtcttttttggttatccagcaaccaggtaatacgtttaggtagcgttcgcgaggtgtcttcgcgcaccaatgacggccagttgcgcaacgtatcatcgctgaacgggccatccatcaacgccagcgggtggtggctggcaacaacgcaactccagcttaacatccccatatcccggaaggtataacgaccgcctaccggaatcgcgcgtgttgcgccaatcgccagttccacgcgcccgtcggaaagtgcatcccagacaccgttgaacacttcctgaaagacaagaagttcgacatcatcaaaatggcgataaaaatcaacgatcatctgccgtgttcgctctggcctgacaatattatccactgcgatagctaactgaccgcgccagccgttcgctatctgctgacattgctggcgggtgatctgcatttttttgacaacagagcgtccttctttgagaaaccacgccccggcagcggtcagttccacatcacggtgacgtcgttcaaaaagcggcaccgccagccactcttccagctgacgcacggtatagctgaccgcagaaggaacgcgatgcaactcctgggccgcggcgctaaaactaccattacgcgctaccgcatcaacaacttccagagaatattctgaccacatagtctgcctgcaaaatttttgaaaccaatcatcaaatattaccgtttcacaacactaatttcactccctacactttgcggcggtgtttaattgagagatttagagaatatacatgcaacctgggaaaagatttttagtctggctggcaggtttaagcgtactcggttttctggcaaccgatatgtatctgcctgctttcgccgccatacaggccgacctgcaaacgcctgcgtctgctgtcagtgccagccttagtctgttccttgccggttttgccgcagcccagcttctgtgggggccactctccgaccgttatggtcgtaaaccggtgttattcatcggcctgacaatttttgcgttaggtagtctggggatgctgtgggtagaaaacgccgccacgctgctgatattgcgttttgtacaggctgtgggtgtctgcgccgcggcggttatctggcaagcattagtgacagattattatccttcacagaaagttaaccgtatttttgcgaccatcatgccgctggtgggtctgtctccggcattggctcctctgttaggaagctggctgctggtccatttttcctggcaggcgattttcgccaccctgtttgccattaccgtggtgctgattctgcctattttctggctcaaacccacgacgaaggcccgtaacaatagtcaggatggtctgacctttaccgacctgctacgttctaaaacctatcgcggcaacgtgctgatatacgcggcctgttcagccagtttttttgcatggctgaccggttcaccgttcatccttagtgaaatgggttacagcccggcagttattggtttaagttacgtcccgcaaactatcgcgtttctgattggtggttatggctgtcgcgccgcgctgcagaaatggcaaggcaagcagttattaccgtggttgctggtactgtttgctgtcagcgtcattgcgacctgggctgcgggcttcattagccatgtgtcgctggtcgaaatcctgatcccattctgtgtgatggcgattgccaacggtgcgatctacccgattgttgtcgcccaggcgctgcgtcccttcccacatgcaaccggtcgcgccgcagcgttgcagaacactctgcaactgggtctgtgcttcctcgcaagtctggtagtttcctggcttatcagtatcagcacgccattgctcaccaccaccagcgtgatgttatcaacagtagtgctggtcgctctgggttacatgatgcaacgttgtgaagaagttggctgccagaatcatggcaatgccgaagtcgctcatagcgaatcacactgatctatatcgatatacttatacttaggctgctaacaaaattttgttgtatgattgaaattagcggcctatactaatttcgagttgttaaaactacgataaatattatgttattacggggacaggatcgttcccgactcactatggatggtcatttcggcaagggttcctcctttccctctgttctacgtcggattatagactcgcggttttttctgcgagatttctcacaaagcccaaaaagcgtctacgctgttttaaggttctgatcaccgaccagtgatggagaaactatgagttcatcgtgtatagaagaagtcagtgtaccggatgataactggtaccgtatcgccaacgaattacttagccgtgccggtatagccattaacggttctgccccggcggatattcgtgtcaaaaaccccgatttttttaaacgcgttctgcaggaaggttctttggggttaggcgaaagttatatggatggctggtgggaatgtgaccgactggatatgttttttagcaaagtcttacgcgcaggtctcgagaaccaacttccccatcatttcaaagacacgctgcgtattgccggcgctcgtctcttcaatctgcagagtaaaaaacgtgcctggatagtcggcaaagagcattacgatttgggtaatgacttgttcagccgcatgcttgatcccttcatgcaatattcctgtgcttactggaaagatgccgataatctggaatctgcccagcaggcgaagctcaaaatgatttgtgaaaaattgcagttaaaaccagggatgcgcgtactggatattggctgtggctggggtggactggcgcactacatggcgtctaattatgacgtaagcgtggtcggcgtcaccatttctgccgaacagcaaaaaatggctcaggaacgctgtgaaggcctggatgtcaccattttgctgcaagattatcgtgacctgaacgaccagtttgatcgtattgtttctgtggggatgttcgagcacgtcggaccgaaaaattacgatacctattttgcggtggtggatcgtaatttgaaaccggaaggtatattcctgctccatactatcggttcgaaaaaaaccgatctgaatgttgatccctggattaataaatatattttcccgaacggttgcctgccctctgtacgccagattgctcagtccagcgaaccccactttgtgatggaagactggcataacttcggtgctgattacgatactacgttgatggcgtggtatgaacgattcctcgccgcatggccagaaattgcggataactacagtgaacgctttaaacggatgtttacctattatctgaatgcctgtgcaggtgctttccgcgcccgtgatattcagctctggcaggtcgtgttctcacgcggtgttgaaaacggccttcgagtcgctcgctaaaggctattctatcgccccctctccgggggcgatttcagatcaggcttgtgtacctggttgattcatggcattttctcgtgccgccagtacacgttctaccgtatctaccactgcctgagtttgtggatcgatttcaatgttgacgcgtgcgccgagttttttcttcccaagagtcgtgcgttccagtgtttccggaattaaatggacgcaaaaacgcgttggcgtgacttcgccgacggtcaggctaataccgtcgatgccaataaatcctttgtacaggatatatttcatcaactgactatcctggactttaaaccagatctgacgattattttccgaggttaatattttcgccacttcagcggtggtcataatatgacctgacattaagtgtccgccaatttcatcgctgaatttcgccgcacgctcaacgtttacccaatcccccacttttaaatcgccaagattagtaatgcgtaacgtttctttcatcagatcaaaactgacatggttgccgttaatttccgtcacggtcaggcaacaaccgttatgcgccacggaagcaccggtttccagaccgtccagcatgtggtcgggtaactccaccacatgcgtgcgaaaatttggtttttcgtcaatcgacaccagttttgcggtgccctgtacaatccccgtaaacatacttacaactcctgaaatcagttaagacattctgttcagcacaatagcaggtggcaaacgcccttaccagtgaaggggtaagaatgactattttttcactggagaattaataaatcctcgctacaatagactgaatttcccctgcttcttctttttgctgcccattcaggcggctttttagtctctcatataactacaaataaaaggtgttcacgtgcagaagtatatcagtgaagcgcgtctgttattagcattagcaatcccggtgattctcgcgcaaatcgcccaaactgcgatgggttttgtcgataccgtgatggcgggcggctatagtgccaccgacatggcggcggtcgctatcggtacttctatctggcttccggcgatcctctttggtcacggactgctgctggcattaacgccggttatcgcgcaattaaatggttccggtcgacgtgagcgcattgcgcatcaggtgcgacagggcttctggctggcgggttttgtttccgttctcattatgctggtgctgtggaatgcgggttacattatccgttccatgcaaaacatcgatccggctctggcggacaaagccgtgggttatctgcgtgcgttgctgtggggcgcgccaggctatcttttcttccaggttgcccgtaaccaatgtgaaggtctggcaaaaaccaagccgggtatggtaatgggctttatcggcctgctggtgaacattccggtgaactatatctttatttatggtcatttcggtatgccagagctcggtggcgttggttgtggcgtagcgacagcggcggtgtattgggtcatgttccttgccatggtttcttacattaaacgcgcccgctcgatgcgcgatattcgtaacgaaaaaggcaccgcgaagcccgatcctgcggttatgaaacgactgattcaactcggtttgccgattgcgctggcactgttttttgaagtaacgctgtttgccgtcgtggctctgttagtgtctccgctcggtattgttgatgtcgcaggacatcagattgccctgaactttagttcactgatgttcgtacttcccatgtcgctggcggcagcggtaaccatccgcgtaggttatcgtctgggtcagggctcaacgctggatgcgcaaaccgctgcgcggaccgggcttatggtgggtgtctgtatggcaaccctgacagccatattcacggtttcactgcgggagcaaatcgccctgttgtacaacgacaatcccgaggttgtaacgctggctgcgcatttgatgttgctggcggcggtatatcagatttctgactctatccaggtgattggcagtgggattttgcgtggttataaagatacgcgttccattttctatatcacctttacggcttactgggtgctgggcttgccaagcggctatattctggcactgaccgatctggtcgttgaacctatggggccagcaggcttctggataggctttattattggcctgacttcggcagccattatgatgatgctgcgtatgcggttcctgcaacgtctgccgtcagccatcattctgcaacgagcagctcgctagtaaagacaaggcgcaaccttcacgggttgcgcctgtgtttttacgcaggctggagcgttgcgccaatcccgtcttcgtctggctgtagtttcagtgcgttacacagagtttgccgactggcatctgttatctcaacgtgtatatcaccagtaacttcccctttcacattgatgaagtcaggtgaaatttctttcgcactggtttgcaggcaaatcgctccctctccacgcaggcgtttcactttcagatgcacctgcgttgccgcatcagtgatcagccacagttttccgccattcagattgatgttaccaacactgaaagtgacactgtcaccttttaccgtactgccgtcgagaatcaacacaccgccctgctgtacagtaatcgttgattgttgcagatctgcgccatagccaataatcattgaagcgccgtccagtaatgcaacactaccggtcagttcaaccggtgcgcgatcttcctctacgacaaaattttcgtccgcgctggtgggtgacaacaaaatcactgtcccaccttgtattaccgcgttttccagcgtaccagcatgcacttcagcccgaccacccacattaacggacaggttttgcgtcttaccggaactgtagagctgaagaccatccgtccccagacgatagatggctccattctcaacaatagtgtcagagtcttcaccaccgagattattcatggtgccaccagcaagcaacgtatcattggctttccccgccagcataaaaacgccgccctgattaatctcacaattgctggcttccccacctggatacaccaacaattcaccaccttcatctaccacgaccgctgaggttgtcccattgaccaacaggccaccctcttgatcgagaataattttttccgcgcgatggccttccagtacacgcaggttaccgccattttccagcaacaaaccgcaggcataacctttatcaacgctgaattcaccttcgggatggcggccattaaccgtagcgagcgtagagagactaattgcgcctccctcggactgaacaatatctgtggcaatggcaccgtcgctgaccgatagcgtgccattgttaccgtactgtgcgcatttggctatcccaccggttgccactttcaaccagccagcccccgtgaccacggtattttcggctcttccgccagcttcaacaatcaactcgccttcagtaagttgcgtcgcgccaataacctcgccggtcttaacaatttgcacgttcccgtcgctcatcaagtttttcgcatcagatcccatgatttattcctttgctgcatctgtgtgcctttattgctacctaagtgtaaaggctacgaaggatttatccacgacagatttgagatggtggcaaacaactctgtttaaactctgatacacggattattgggttgtatcagatgtaaatgcgatcctgaataaaaatcgcccttgcaaatcaacaaaatatagccaatttgcttaaaagctctgcaaacggtcgaaatagcgcagaaaattacgttttgcctcttgccaccttcccactctgccgctaatattcgtccccgttgtcacctacaacgttgcgttcatagctcagttggttagagcaccaccttgacatggtgggggtcgttggttcgagtccaattgaacgcaccatcctgcgtccgtagctcagttggttagagcaccaccttgacatggtgggggtcggtggttcgagtccactcggacgcaccagattttnnnnnnnnnnnnnnnnnnnnnnnnnnnnnnnnnnnnnnnnnnnnnnnnnnnnnnnnnnnnnnnnnnnnnnnnnnnnnnnnnnnnnnnnnnnnnnnnnnnnnnnnnnnnnnnnnnnnnnnnnnnnnnnnnnnnnnnnnnnnnnnnnnnnnnnnnnnnnnnnnnnnnnnnnnnnnnnnnnnnnnnnnnnnnnnnnnnnnnnnnnnnnnnnnnnnnnnnnnnnnnnnnnnnnnnnnnnnnnnnnnnnnnnnnnnnnnnnnnnnnnnnnnnnnnnnnnnnnnnnnnnnnnnnnnnnnnnnnnnnnnnnnnnnnnnnnnnnnnnnnnnnnnnnnnnnnnnnnnnnnnnnnnnnnnnnnnnnnnnnnnnnnnnnnnnnnnnnnnnnnnnnnnnnnnnnnnnnnnnnnnnnnnnnnnnnnnnnnnnnnnnnnnnnnnnnnnnnnnnnnnnnnnnnnnnnnnnnnnnnnnnnnnnnnnnnnnnnnnnnnnnnnnnnnnnnnnnnnnnnnnnnnnnnnnnnnnnnnnnnnnnnnnnnnnnnnnnnnnnnnnnnnnnnnnnnnnnnnnnnnnnnnnnnnnnnnnnnnnnnnnnnnnnnnnnnnnnnnnnnnnnnnnnnnnnnnnnnnnnnnnnnnnnnnnnnnnnnnnnnnnnnnnnnnnnnnnnnnnnnnnnnnnnnnnnnnnnnnnnnnnnnnnnnnnnnnnnnnnnnnnnnnnnnnnnnnnnnnnnnnnnnnnnnnnnnnnnnnnnnnnnnnnnnnnnnnnnnnnnnnnnnnnnnnnnnnnnnnnnnnnnnnnnnnnnnnnnnnnnnnnnnnnnnnnnnnnnnnnnnnnnnnnnnnnnnnnnnnnnnnnnnnnnnnnnnnnnnnnnnnnnnnnnnnnnnnnnnnnnnnnnnnnnnnnnnnnnnnnnnnnnnnnnnnnnnnnnnnnnnnnnnnnnnnnnnnnnnnnnnnnnnnnnnnnnnnnnnnnnnnnnnnnnnnnnnnnnnnnnnnnnnnnnnnnnnnnnnnnnnnnnnnnnnnnnnnnnnnnnnnnnnnnnnnnnnnnnnnnnnnnnnnnnnnnnnnnnnnnnnnnnnnnnnnnnnnnnnnnnnnnnnnnnnnnnnnnnnnnnnnnnnnnnnnnnnnnnnnnnnnnnnnnnnnnnnnnnnnnnnnnnnnnnnnnnnnnnnnnnnnnnnnnnnnnnnnnnnnnnnnnnnnnnnnnnnnnnnnnnnnnnnnnnnnnnnnnnnnnnnnnnnnnnnnnnnnnnnnnnnnnnnnnnnnnnnnnnnnnnnnnnnnnnnnnnnnnnnnnnnnnnnnnnnnnnnnnnnnnnnnnnnnnnnnnnnnnnnnnnnnnnnnnnnnnnnnnnnnnnnnnnnnnnnnnnnnnnnnnnnnnnnnnnnnnnnnnnnnnnnnnnnnnnnnnnnnnnnnnnnnnnnnnnnnnnnnnnnnnnnnnnnnnnnnnnnnnnnnnnnnnnnnnnnnnnnnnnnnnnnnnnnnnnnnnnnnnnnnnnnnnnnnnnnnnnnnnnnnnnnnnnnnnnnnnnnnnnnnnnnnnnnnnnnnnnnnnnnnnnnnnnnnnnnnnnnnnnnnnnnnnnnnnnnnnnnnnnnnnnnnnnnnnnnnnnnnnnnnnnnnnnnnnnnnnnnnnnnnnnnnnnnnnnnnnnnnnnnnnnnnnnnnnnnnnnnnnnnnnnnnnnnnnnnnnnnnnnnnnnnnnnnnnnnnnnnnnnnnnnnnnnnnnnnnnnnnnnnnnnnnnnnnnnnnnnnnnnnnnnnnnnnnnnnnnnnnnnnnnnnnnnnnnnnnnnnnnnnnnnnnnnnnnnnnnnnnnnnnnnnnnnnnnnnnnnnnnnnnnnnnnnnnnnnnnnnnnnnnnnnnnnnnnnnnnnnnnnnnnnnnnnnnnnnnnnnnnnnnnnnnnnnnnnnnnnnnnnnnnnnnnnnnnnnnnnnnnnnnnnnnnnnnnnnnnnnnnnnnnnnnnnnnnnnnnnnnnnnnnnnnnnnnnnnnnnnnnnnnnnnnnnnnnnnnnnnnnnnnnnnnnnnnnnnnnnnnnnnnnnnnnnnnnnnnnnnnnnnnnnnnnnnnnnnnnnnnnnnnnnnnnnnnnnnnnnnnnnnnnnnnnnnnnnnnnnnnnnnnnnnnnnnnnnnnnnnnnnnnnnnnnnnnnnnnnnnnnnnnnnnnnnnnnnnnnnnatcccgaggttgtaacgctggctgcgcatttgatgttgctggcggcggtatatcagatttctgactctatccaggtgattggcagtgggattttgcgtggttataaagatacgcgttccattttctatatcacctttacggcttactgggtgctgggcttgccaagcggctatattctggcactgaccgatctggtcgttgaacctatggggccagcaggcttctggataggctttattattggcctgacttcggcagccattatgatgatgctgcgtatgcggttcctgcaacgtctgccgtcagccatcattctgcaacgagcagctcgctagtaaagacaaggcgcaaccttcacgggttgcgcctgtgtttttacgcaggctggagcgttgcgccaatcccgtcttcgtctggctgtagtttcagtgcgttacacagagtttgccgactggcatctgttatctcaacgtgtatatcaccagtaacttcccctttcacattgatgaagtcaggtgaaatttctttcgcactggtttgcaggcaaatcgctccctctccacgcaggcgtttcactttcagatgcacctgcgttgccgcatcagtgatcagccacagttttccgccattcagattgatgttaccaacactgaaagtgacactgtcaccttttaccgtactgccgtcgagaatcaacacaccgccctgctgtacagtaatcgttgattgttgcagatctgcgccatagccaataatcattgaagcgccgtccagtaatgcaacactaccggtcagttcaaccggtgcgcgatcttcctctacgacaaaattttcgtccgcgctggtgggtgacaacaaaatcactgtcccaccttgtattaccgcgttttccagcgtaccagcatgcacttcagcccgaccacccacattaacggacaggttttgcgtcttaccggaactgtagagctgaagaccatccgtccccagacgatagatggctccattctcaacaatagtgtcagagtcttcaccaccgagattattcatggtgccaccagcaagcaacgtatcattggctttccccgccagcataaaaacgccgccctgattaatctcacaattgctggcttccccacctggatacaccaacaattcaccaccttcatctaccacgaccgctgaggttgtcccattgaccaacaggccaccctcttgatcgagaataattttttccgcgcgatggccttccagtacacgcaggttaccgccattttccagcaacaaaccgcaggcataacctttatcaacgctgaattcaccttcgggatggcggccattaaccgtagcgagcgtagagagactaattgcgcctccctcggactgaacaatatctgtggcaatggcaccgtcgctgaccgatagcgtgccattgttaccgtactgtgcgcatttggctatcccaccggttgccactttcaaccagccagcccccgtgaccacggtattttcggctcttccgccagcttcaacaatcaactcgccttcagtaagttgcgtcgcgccaataacctcgccggtcttaacaatttgcacgttcccgtcgctcatcaagtttttcgcatcagatcccatgatttattcctttgctgcatctgtgtgcctttattgctacctaagtgtaaaggctacgaaggatttatccacgacagatttgagatggtggcaaacaactctgtttaaactctgatacacggattattgggttgtatcagatgtaaatgcgatcctgaataaaaatcgcccttgcaaatcaacaaaatatagccaatttgcttaaaagctctgcaaacggtcgaaatagcgcagaaaattacgttttgcctcttgccaccttcccactctgccgctaatattcgtccccgttgtcacctacaacgttgcgttcatagctcagttggttagagcaccaccttgacatggtgggggtcgttggttcgagtccaattgaacgcaccatcctgcgtccgtagctcagttggttagagcaccaccttgacatggtgggggtcggtggttcgagtccactcggacgcaccagattttcttaatctggtcttctccttttttccctctgtttcttctatgtatccaatacgttaaaagatctacactgtcttcgtatgcgttatcagaaggagaatcgctatggcaactttgttacaacttcattttgcttttaatggcccatttggcgacgcaatggctgagcagcttaaaccgcttgctgagtcgattaatcaggaacctggttttctgtggaaggtttggacagaaagtgaaaagaaccacgaagccggtgggatctaccttttctctgatgaaaaaagcgcccttacctatctggaaaaacatactgcccgactgaaaaatcttggcgttgaggaagttgtcgccaaagttttcgatgtcaatgtgtcactgagtcaattcaatcaggcaaaacttgcctgacagattttaatcaagggcggttagtgcccttttcatccctgtctgaaatttctcaaattctaaaaatctcaaccaaacttacctgataacactaaattcgaaagaatgcgtacaggtaagtaacaatgaaaacaattgctattgtgggtgccgggcctacggggatctacaccttattctcgcttctacagcaacaaacgccactttctatttctatcttcgagcaggctgacgaagccggtgtcgggatgccatacagtgatgatgaaaactcaaaactgatgctggcaaacattgccagtattgaaataccgccgatttattgcacgtatctcgaatggctacaaaagcaagaagccagccatctccagcgttatggcgttaaaaaagaaaccttgcacgatcgtcagtttttaccgcgaattctgctgggcgaatatttccgcgatcaatttttacgattagtagaccaggcacgacagcaaaaatttgcagtggctgtttatgaatcatgccaggttaccgatctgcaaattacaaatgctggcgtcatgctcgctacaaatctggatttacccagcgagacgtttgatttagtggtgatcgcaacggggcacgtctggcctgatgaagaagaagcaaccagaacgtattttcccagcccgtggtcaggcctgatggaagcaaaggtcgatgcgtgtaacgtgggtattatgggaacatccttgagcggactggatgcggcaatggcagtggctattcagcatggttcgttcattgaagatgataaacaacacgtcatttttcaccgcgataacgcaagtgaaaagctaaatattacgttaatgtcgcgcacaggtattttacccgaagccgatttctattgccctattccctacgagcccttacacatcgtcactgatcaagcattaaatgctgagattcaaaaaggcgaagagggccttttggatcgggtatttagattgatagtagaggaaatcaaatttgctgatccagactggagccaacgcatagccttagaaagcctgaatgtcgattcctttgctcaagcctggtttgccgagcgcaaacaacgcgacccattcgactgggcagaaaaaaatctccaggaggtcgaacgcaataaacgagaaaatcatactgttccctggcgttatgtcattctgcgcctgcatgaagccgtacaggaaattgttcctcatctgaatgaacacgaccataaacggttcagtaaaggccttgcccgggttttcatcgataattatgcgacaatcccttcagagtctattcgtcgactactggccttacgtgaagcgggaatcattcatattctcgccctcggtgaagactacgaaatggaaattaatgagtcgcgcaccgtcctgaaaacggaagacaatagctactcgtttgacgtttttattgatgcccgtgggcagcgtccgcttaaagtgaaagatattcctttccctggactacgcgaacaattacagaaaacaggggatgaaatccctgatgttggcgaagattatacgttacagcaacccgaagatattcgtgggcgcgtagcgttcggcgcgttgccctggttgatgcacgaccagcctttcgttcagggacttacggcatgtgcagaaattggagaggcgatggctcgggcggtcgtaaaacctgcatcccgtgctcgtcggcgtctttcgtttaatcaaatgtaaagctatcagcactcaacaaactgatgctgttcattaaggcgatagcggactccggctcgaatattgttttcaccttcaatggcgacggcgaagcgaactctttcgccgtcatgatatgccagtgcggcgcttcctcctggcccgagaataattgagtcgaccacgcccgtgctcactaccgttgaattttcaccgctggcaatgatgtgtacattgtcgccgctgttggcaattctggcgtttgcgccaaagctggcgatttgcaccaggtcaccattactggcgacatgacaccgttcacccaatgtacaaacgcgtactcgcattccggtattcgcaatccgactactatctccagcgctgcttatccgcgaagaattaccggttacagcaacccgtgcgcgttcaccggagctgccaatgtgactgttaaagccgacacttccaatccgcacgctataacccatactggcaatttgcgcggcatacccagcagttgcgattctggcattatcctcacaacagccgatgcgagcatgatcgtcgctgcgggcaaactgactgcaaaatgctctctctccgggatctgtggccagtttttgcatagaagaaacttcctgatgcgcgaagttttcatccgccagccattttttccacgcatactcaaccagactctccgcccagtccgtatatccttcctcaatcagtgcatgatgaatatcggcataactaccgccgcgtgggaaatggcgcagaaaccagcgatacatcaccgctccgatacgccattctcgcaggtctgctcgtgtaatgatcattcgttagtgccggtgatagccatcgaccatgcttttaaaggtttcgtgtggcgtacgccccgtggtgcaaagataaagatgaccgaagataaaaaagaggcttataaatgccagagcaaaatgcgcctgcaataaccagtatcttacgccaggaaacatatctcccacggcttgcggatagagacacagcagccccgtcaatagtaacaacggcagcaatccatacatgacaccaacataggcaacctgctgtaagggattaaatttagactgggttgttgccgggaaaggatgttcttccccctgcataatgccaaacaaatagaatcgcgtttgttttgccgctcgctccagccacccctgacgacgaatgcgatagtggtgaccattacccccaacggcattgatcagaacaaagccgagccagcatgccagtaacaaaaatccgcaaacttcatgcaccgcaaccagacttttaaccgcagttgcgcccaccagcgcaaagtgatttatcagcccacttgccagcaacaatacaaagagtaacgcattcgaccagtgccataatctgaccgctttgctgtaaagataaatcctctcaccatgatcggtggctgatttcttcacgccacgagcacgaagcaaggcatgtagccccagcaccaaccacatcccaaccagcaatagtccggcaatgatcaaccacaccggccaaaattggggggtgaactgtggcacatagttcgccaactggctctgaaactgttcagcatgttgcgacgggttcatacattttcctttttaatcaaatgttgaccgaaccggcgatacagatgcggtttcccggcgccaggtagctgatattgatagtatttattttcctgcaaccacgcctgaatttctgggctatcttcgtgaccaaagatcaatgcgtgttccgggcaggcactgacgcaaatgggcggaaagccttttgccagtcgggtctcagcgcagaaatcacatttatctgccactttagtgacagggttaaggtagcgaacctggtacgggcaagcgccaatgcaataactgcagccgatgcactgcgatttttctacccgcacgatcccctgctcatcacgccacgacgcccctgtcgggcaaacgtcgatgcaaggagcatcttcgcagtgctgacatgactggcgaaaaaagtgatactgcgttccattgtcgttatcgatgactggaatgtgtgctatcgataaacggcttccctgagcggggacgtggttagttttacggcatgcgcgggcgcagatattacagccattgcaccgtgactcgtcatgaatcatggcataccgaacttccttttcttgcctcgtattcgctaacagagaagacgcagaaccagtaaaaaagattactgttcccatccccagaacaaatttgcgtcgagtgaaggacatctgattatcccctaatgcagtggctgcaactgtccaccctatccatgacatccccctgaaatttcaggggttctgaaactgctctacctcgaaccattcgcataagccatacgccttgccataggtcataaatcgctcgctaaacaagtacaacactgccgtcgatgactccacctgccgtatatcggcatattcaggtgcaacatccatcgtggcgatcgcggcttcaatctgcgcttcctggaagtaatatggcgcttgcatcagcatggcgactttgtaaggacgaggatacgtctggcactcaaaacgaacggcgtgtgcaatggcgcgacaaatgtcctgctccacaacttgcaaagacatcgccgcgtagttttcactcatggcctgcgttgagtaatagtaatcatcctggcttcccgtcatacaagcgatatccgcgtagtctccgttctgcttaatgttttccagcaaaactgacagttcctcttctgcaaccgaatagggcggcgagagaaacacagcgcgcgccaccagctgcccagccgcagaatgctggcgaatgaactctgccaggatttcagccggttctggttcggttaccgtatcaacggggtgacgcatcccctgcaaccattgccgcttcgcctcatcaatttcgctgacttccgctaacggcaattcatcctgatggttcatctctcccattccttacgcaggcagtagattgtgtgctgccagatcggcggcaatatcttccagccccagacgctgcaatgtttcgcgggtcggacaaccaagctgtgggtcccagcccatttctttgtagaacatcgtgagcgaagcatgcatatcgtcacgatccattttgtctgtaccttcagtaaagaccgggatctgcggatccttgtcgaatacccaggaacagataagatcgtgttcattacgcatatctttggtttgcatcagttttaccgtgtaggcgcgatgcaacgtaaagatacgctctgcagctaaatctaatttttcctgagtcatatcttcgccagtgatcgctttgaagaatttggcttcaagtgccagatcgccccggtaattacggcttttcagcggcgaaacggtcattggccagacccagttgcacagggtgacggcgttatgcaaacagacccgcaacagcgaccacttagcatatttaatttttgcgtcattgatcggtgtgtagtttttggtttcatcgtaagcatcttcagaaccaaaaagctctttcgccacttcacgctgcagtttcaatggcaagccggaaccaataaaattgatatgggtatgcgtcatgcagtcacggttgaacatacagttaacaatggaaccgacttgcgctgacgcttcattggcatggtgaaccggatagccaaacggcgaccagagtttatttttcgcgtagccccagtactcttcacccaaattccagcgttctgcgatggcatatgaaccatcagccaggtgactcaactcacccacgcgatgcgccagacggtagtaaaaatctttaataaagttaacgtcacccgcttccagttgatcccagcgaatttccgcatactcttcagcaggcagaacacgcttgaacacccctttgctgtaacaataagtaaagtcgcgatgcaactgcccgtagttacaccataggccgtagtcatcgaacaaattcagaccaaccaggttaccaatcacacgaccatcgtctttatcttcaaaatctttcggcccgttcgggaagatggtggtatggacaaagtttgctacacaagtgttaccacctgtgctgggcacgccaaactctttcacccgaggaatattcatttgggtcatacaacggatcgggcaagagtggcagccgctcatttttactgtgtatttctctgccgccggacctaagtcaaaaacggatttataggtacgaaagccgaccgtgttctgattgcctggcggaatttcccccgtttcaatcggaccaccttcagccgcgccccaaaacagccctttacgtgctgtccaacgtgacttgggatctgaatactctgcccacgattgcggcgtacttggcacgacatggttgttattcgcaccgataagttcagtcatcatgtaatcgttgagacgcttcatctcctgacgatcggcaatgttgacccctttcgtcccttcaaccgcaatcgctttcaggtttttcgaacccattattgcgccagttcccgcaccgccgctgtggttacggctattcaacatgccagagagaggaacaaggttttccccagcctgaccaatagccgccacacaggtttccggactggtcaagcgacaaatttcttcagtcgttgcgcgcgtcccttttccccataagaaatcggctttttcaaggctaactttgtcatctttaatcttcagccataccggtgatttcgctttcccttcgataataatgacgtcgtatccagcgaatttcatttgcgctgcaaaaaagccccccatatgggcatcgacgactaaatttcctttggtaaaagtagaaagtgaggtgatatttacgcgagaactacagggggcaccagatccagttaatgggccggtagcaaaaactaatttattcgcttcatcgaaaggtttcgtgcctggcggtacttcgtcatacataattttgtagccgaagcccatgccaccgacaaaacttttaaacttactggaatcttcgagggtaatatttcctgtcgtgagattgactcttaatatattacctgtccaaccgttagccatgattttttcctttgcaagattcacacagtaatatctttccactcgataatttttaacgcccctgttgggcaggcgtttgcgcattcaccgcataacacacatttcgaggattttttactttcggtatttacggtggccatcatccacgggcatgccgtagtacaggcgctacagccaatacaacgtttatgatcgacggtaatacagccttctttctgctgccaggtaatcgcaccaatcgggcagacgttcatgcattgcggctctttgcattgacggcaggtgtccgcggtatagttgagatcgccatacaggccaccgccagagccaaccccgttgtcgccaaagaaataattgcgatggattttgatacgggagaagaatgtccctactgagccatcgttgaagttggtacaagagatttcacagcggtggcaacccgtgcatcgcgcacgttgggtcaccagcacccctttgggtgtatttatcaaccctactgtgccgctatcaatatcttcctgtttgcaacccaaaagtgacagtaaagcaggggcaattgttaaaccagcaaggccttttcctgatatacgcaagaattctaatcgcgttaagccaatatttaatagtggacgatcaaccgggttcatttatttcgcatcctcttcgcaaacacagtgctgacaattcagcagcctgatattaggcactcaactaatacgctgctgactctgtcctcaacaccagatattttcccaaacccgatagtgtatgagaaaagatttaacgctgacaaactaatcctttatggttaggagaaaaaataatgtgattattctgggctcttaacattgatcgttatcaattaaaatcacaaagcaaggaattataagtgaactgatatttattatcatttgaaataaatttaacttaaccgacaattatttgtgaagttcatcgcagaaaataaaaataactttatcgctataaattaaaatacacaccgaaattcatataatttcagcagttgttatttagaatgattaactggaccgcaactgaactaacaatatcaggatgaagcttaccgcctcatcctgaatggtcattttaccagtgcgttaatgactgtttccatcgcctgcttttccagctcactgcgctgaatgcgtttattggctaatgctgtacgtaatacgcctgcgataacaatatgctttggttcctgccccagatcgcgcatttccagcacaactttaccgacaactctgcacatttctcggtacagttcatcctcttttgtccggtttcccattctttatacctatttatcatgccaactatcagcatatatcaatctaaccaattaaacaaaaatcaaacaaaatcagacaaataacgtgataaattattttaactgtagcaattgagcgatgatgtatttatacaccggatgaacttttcacttatcctcacactgacaaccccggcaccagacgttgcgcaaacaacgaagtttttgcgtaaccttttccctggaacgctgaatctttgataacaatttattgtcttacaagttgtatattttttgaaacgctgtttttgttttccttttggattaatttcagcgtataatgcgcgccaattgactcttgaatggtttcagcactttggactgtagaactcaacgactcaaaaacaggcactcacgttgggctgagacacaagcacacattcctctgcacgctttttcgatgtcacctatccttagagcgaggcacaaccactttcgtaataccggattcgctttccggcagtgcgcccagaaagcaagtttctcccatccttctcaacttaaagactaagactgtcatgaaaaagaccaaaattgtttgcaccatcggaccgaaaaccgaatctgaagagatgttagctaaaatgctggacgctggcatgaacgttatgcgtctgaacttctctcatggtgactatgcagaacacggtcagcgcattcagaatctgcgcaacgtgatgagcaaaactggtaaaaccgccgctatcctgcttgataccaaaggtccagaaatccgcaccatgaaactggaaggcggtaacgacgtttctctgaaagcgggtcagtcctttactttcactactgataaatctgttatcggcaacagcgaaatggttgcggtaacgtatgaaggtttcactactgacctgtctgttggcaacaccgtactggttgacgacggtctgatcggtatggaagttaccgccattgaaggtaacaaagttatctgtaaagtgctgaacaatggcgacctgggcgaaaacaaaggtgtgaacctgcctggcgtttccattgccctgccagcactggctgaaaaagacaaacaggacctgatctttggttgcgaacaaggcgtagactttgttgctgcttcctttattcgtaagcgttctgacgttatcgaaatccgtgagcacctgaaagcgcacggcggcgaaaacatccacatcatctccaaaatcgaaaaccaggaaggcctcaacaacttcgacgaaatcctcgaagcctctgacggcatcatggttgcgcgtggcgacctgggtgtagaaatcccggtagaagaagttatcttcgcccagaagatgatgatcgaaaaatgtatccgtgcacgtaaagttgttatcactgcgacacagatgctggattccatgatcaaaaacccacgcccgactcgcgcagaagccggtgacgttgcaaacgccatcctcgacggtactgacgcagtgatgctgtctggtgaatccgcaaaaggtaaatacccgctggaagcggtttctatcatggcgaccatctgcgaacgtaccgaccgcgtgatgaacagccgtctcgagttcaacaatgacaaccgtaaactgcgtattaccgaagcggtatgccgtggtgccgttgaaactgctgaaaaactggatgctccactgatcgtggttgctactcagggcggtaaatctgctcgcgcagtacgtaaatacttcccggatgccaccatcctggcactgaccaccaacgaaaaaacggctcaccagttagtactgagcaaaggtgttgtgccgcagctggttaaagagatcacatctactgatgacttctaccgtctgggtaaagaactggctctgcagagcggtctggcacacaaaggtgatgtcgtagttatggtttctggtgcactggtaccgagcggcactactaacaccgcatctgttcacgtcctgtaatattgcttttgtgaattaatttgtatatcgaagcgccctgatgggcgctttttttatttaatcgataaccagaagcaataaaaaatcaaatcggatttcactatataatctcactttatctaagatgaatccgatggaagcatcctgttttctctcaatttttttatctaaaacccagcgttcgatgcttctttgagcgaacgatcaaaaataagtgccttcccatcaaaaaaatattctcaacataaaaaactttgtgtaatacttgtaacgctacatggagattaactcaatctagagggtattaataatgaaagctactaaactggtactgggcgcggtaatcctgggttctactctgctggcaggttgctccagcaacgctaaaatcgatcagctgtcttctgacgttcagactctgaacgctaaagttgaccagctgagcaacgacgtgaacgcaatgcgttccgacgttcaggctgctaaagatgacgcagctcgtgctaaccagcgtctggacaacatggctactaaataccgcaagtaatagtacctgtgaagtgaaaaatggcgcacattgtgcgccatttttttgcctgctatttaccgctactgcgtcgcgcgtaacatattcccttgctctggttccccattctgcgctgactctactgaaggcgcattgctggctgcgggagttgctccactgctcaccgcaaccggataccctgcccgacgatacaacgctttatcgactaacttctgatctacagccttattgtctttaaattgcgtaaagcctgctggcagcgtgtacggcattgtctgaacgttctgctgttcttctgccgatagtggtcgatgtacttcaacataacgcatcccgttaggttccacggaatatttcaccggttcgttgatcactttcaccggtgttcccgtccgcacgctggagaataaagctttaatatccggtgcattcatgcgaatacagcccgaactgacgcgcaaaccgacgctgtccggcgcactggtgccatgaatgaggtattcgccattaccatgcgcgaggcgcagtgcgtaacgtcctagtgggttattgggcccggcaggaacgactggtggtaatttaatgccacgctccagcgaacgttgacgaatgcccgccgtaggcgtccaggttgggttagggattttctgccccacacgcgtttccatcaccggcgtttccagcccctgcaaaccaatacctatcggataaacctgcacgatattttctcccggcggataataataaaggcgcagctctgcaaggtttacaataatcccctgacgcggcgcatcaggtaataatagttgtgaaggaatagttatcgtcgtaccgggttttggcaccggggcgatagtgttattggcttcaaggatcaacattgccgcagtatcaaaacgtcgggcgatggcctgaaggtttttatccccttcttgcaccgtatacgtttgattttgcccaaccagtcgactgccggttggtggtagcggataatcaaccgcccaggcagcctggatggcgctaaaagcgccgataagcgtgagtgtaagcaaagacgcgcgtttcattgtaaacctcctgtatttgccggagactcacgctgaaacgtcggatggcgcttatgttcacctgaaaccaaaacactcctgtgcaggccagtgtaaacattgaccacccggcaatgtgagccaaccggatgaaagctgtccctttagtttagctaagtgcagcggctttggcgcgaattgcgcgaatcatcgcttccagaccttgtgagcgtgatggggtgagatgttgggtgagcgccattttttcaaaccacgggcgcacatcgaaattgacaatatcctgcggcgtcatttgatcgtaaagaataaagacgaccgcaataagcccttttacaatggccgcatcgctgtcgccctgcaattcaataattccctgcgcattctggcgcattacaatccacacctgactctggcagccctggatgctattttgcgggcttttgtcttcgtcacgtaattctggcagacgctgacccaactcaataatgtagagatatttctcttcccagttggcgcagcgtaaaaaattacgcagcaatttttctttatccggcaataaagccatagtgcctccctgttatcccagcagacggtgaatacgttgcaggccggtcacgagacgatccacttcttcatgggtgttatacatggccagcgacgcccgacacatcgcagggacgttgtaataggccattaatggcattgcgcagtgatgtccggtacgcacagcaatgccgtaattatcgagaaaactgccaacatcataggcgtggtgtttaccgagattaaaagcaataacgccaagtctgtccggcggaccatagagcgtaagatccggcaccgctgccaactgcgacaatgcgtaatgcatcagattttgttcatactcggcaatgttgttaagccccagcgccgaaacatactccagcgccgcgccaaggccaataatacctccggtattgggcgtaccggcttcaaaccgccacggcgctttggtccaggtagtgccttcactcaggctaacggtggcaatcatagaaccgcccccttcccacggcggcatctcctgcaacaaggcttctttgacataaagaatgccaattccggtagggccatacagtttatgcccggagaacacgtaaaaatcgcaatccagcgcctgaacatccaccggatgatgcatcaccgcctgagcgccatccaccagcacttttgcgccatgttgatgcgcaagtgtgatcatctccgccagcggattttctgtcccaagcacgttggagacatgagtaattgccagcaggcgagttttctcatcaaacagcgtaggcagcgtctccagttgcagagtaccgtcggggttgagcgggatcacacgcagctctgcgccaacgcgtgcacaaagcatctgccaggggacaatgttagcgtggtgctccatctgactgatgatgatgttatcgcccgcccgcacattgctgttgccccagctattggcgaccagattgatcccttccgtcgtaccgcggacgaacaccagctcttccgccgaacgggcattaataaacagcgatgcccgcttgcgcacgttctccattttctcggtcgcctgggcgcttaaggtatgaataccgcgatgcaccgccgcgtagccatgacgataaaactcagcctcggcatcaatcacctggctcggtttctgcgcactggcggcgctgtcgagataagccagcggcaaaccgttcacctcacgcgaaagcaccgggaaatcggcccgcaccttatcaacggaaaaagtcatcttgcacctcctggcagccgttgaccgattcgggccagcacctgctgtttaagcccttcatcacgcagtgcttccgtcagttcggcagcaaaggcgtaaatgatcatctgctgggcatcctgctgattgatcccgcgcgagcgcagatagaacatctgttcatcatcaatacgccccaccgtcgcgccgtggctgcatttcacatcatctgcatagatttccagctgcggtttcgtatccacttccgccagtttgcccatcagcagattattgttggtcatctgaccatccgttttgatggcgtgctgcgcgacgttgatcaaaccgttaaataccgcgcggcctttgtcgctgacgatagttttgtgcaactgtcggctgttacaaaaacctttattgtgttccagccaggtacgagtatcacacacctcgtttttcaccggcatcgccaggctattgatccgcaccgtgctgttttcgccattgagttgcgtactggtgttgtgtcgtaacactgcgccacccagcaggaaactgtggctaaatgcggtggcatcatcagccagcaacaaatcgttatgagcaaagtggtgactgagcgggttttcaaacgccagcttgatatgctgcaaatgggcgttcgctgcgacgttgatagtgaaccgtgcgccggtgaagtgacgagcatcattaaggctgacaaaatgttcgatcaccgttgcttcggcaccttccgccagatccagatgatgccggtaatgggcagtattcacctcttcacctgccacgccctgggtgatatgcattaacagcaatggctttgccggccgttgaccgcgcttcacggcgatatgcgtcacgctttgtgccaggctttccgtcaaatgcagaaacacttccgcctgaatagcgtcgggtaacccctgacggtcgtcgttaatgctcacttcatatccgctgccttcagttgcatcgctcagtgcgggcacgtaacgtccatcgacaaacaccagccgcacggcgtctaacgttaacgctaaggcatcacgctgctgtggggctatctcccccgcaatgctgacaaactggctattggtcagcccgtccagcggcgtatatttccagttttcatgtttacgtgtcggcagtccggtacgcagcaattgttgtaaatgctgctgtgcttgcggggagcgtttcgccccttcagcttcaaacaaatgattccactgttgcagtgcgttactgctgttcggtaagccagccataaccctgctcctccagttgtttgaccaacgtgaaatcgccggatttcacaattcgtccctgatacagcacatggacgtaatcaggcttgatgtagtcgagaatgcgttggtagtgcgtaacaatgatgaatgaacgcttgccgtcacgcagcgagttcacgccatcggcaaccacttttaatgcgtcaatatccagcccggagtctgactcatcaagaatgcataactccggttccagcaccgccatttgcaaaatatcgttgcgctttttctcgccgccggaaaaaccaacgtttaccgaacgggttaataaatcttccggcatcttcaggagagcgattttctcttccatcaaatcctgaaaatcaaagcggtcgagcgtttcctggccgcgatagctgcgcaccgcattaagtgccgtttgcaggaaaaactggttactgacgccgggaatttccaccggatactggaaggccataaagatgccttcacctgcacgatcttccggcgacagcgcaagcaaatctttgcctttaaactcaaccgtgccgctcgtcacttcataatcttctcgcccggcaagcgttgccgataaggtacttttgcccgaaccattgggccccataatggcgtgaacttcgccgggacgaacgtcgaggcttaatccacgcaggatagctttatcttccacgctgacgtgtaaatctttaatacttaacatgtttattccttatccgacgctgtgttcaagactgatggcgaggagtttttgtgcttcaacggcaaattccagcggcagttccgagaacacgtctttgcaaaaaccgttaacaatcatcgagatggcatcttcttcgctgatcccgcgttgcaggcagtaaaacagttgatcttcaccaatacgtgatgtcgttgcctcgtgctccagctgagcgctgttattgcgacattcgacatacgggaaggtatgcgccccacaattagcgccaatcagcattgaatcgcactgagtgaaattgcgcgcattggttgccgtcggcatgattttcactaagccgcgataactgttctgactatgtccggcagagatccctttcgatataatggtcgatttggtgtttttaccgatgtggatcatcttggtgccggtatccgcttgctgatgaccgctggtcagcgccactgagtaaaactcaccaatggagttatcgccgcgcaaaatgcagctgggatatttccacgtaatcgctgagccggtttctgattgcgtccatgacattttgctgttttcgccttcgcacaaagcacgcttggtgacgaagttgagaataccgccggtgttgttatcgccagggaaccaattttgtaccgtggaatatttcacctcggcgtttttatggatgatgacttccaccaccgccgcgtgtaactgatagctgtcacgcaccggagcggaacagccttcaatgtagctaacgtagctgtcttcgtcggccaccagaatggtgcgctcaaactgcccggttttttccgcgttaatgcgaaaataggtggaaagttccatcgggcaacgcacgcctttaggcacataaataaacgtaccgtcagaggctaccgccgcattaagtgcggcaaagaagttgtcattccccggcaccacggtgccgagatatttacgcaccagttccgggtgatcgtggatcgcctcgccaaaggaacaaaaaataattccctgctccgccagtttttcgcgataagtagtggcaaccgaaacagagtcgaaaatggcatccactgccacctctttgccttcccgcacgggaacgcccaactgctcaaacgccgcctccacctctttacttaaaaaggcgttcgcgccagtttgctgcaccgcgccgggttcagacgcgcagttgtcgtcacaattaccgcacgatggtgccgagtagtagctgtaatcctgataattcagcttgtcgtagtgcgctttcaaccagtgcggttcttccatctccagccatgcgtgataggcgttgagacgaaactccagcatccactccggctcattacgcttcgccgaaattgcgcgcaccacctcttcgtttatcccctttgccagctcatcggtggctaactgggtgaagaatccttctttataattcagcgggccgccggtccaggttttgacatcgtcagttgcttcagtattacgagacatagtaccgcctataccccaaagctttcgccacagccacattcattctgggctttagggttgtgaaatttgaatatctgattaagtccttcgcgaacgaaatcgacttccgtgccatcaataaaaggcatcgcttgcagcgggacaaacagcttcgcgccgtcgtgttcaaacagcagatcgtctttgtccggctcgctaacactgtcgagcacatagccaaagcccgcgcagcctgtttgcttaacgcctaagcgcacgccgatcataccaggctgctttgccaccagttcgcggatgtgtatcgccgctgcgggtgtcagcgttaagccttgccaggcgaaatcctgtggattaaaggttcctgaatgcatgtccatcgatttacctcacttcatcgctttcagcgtataacagcatgttagtgataatgattatcagttcaacccagcaaacgcaggggctttagcgtaaaacatgctttttacctgcttttaataagcatagaccctgatttgtgggttaacaggcacgctaagaattaggtatctcattgttagataatgattattatctaaggagcattaaggctgtgatgaaaaagaaaaagttgcattgaaaatgactatttaagagataggtaaaaaagtgcagcgttcagaaataagaaaacccttaagtctgtgcgacacaggcttaagggtttctaccccatccggcgcttatctccggcactcacagtggcttagctcttgaaggggcgataaggataatctcataaagctaacccactgttttaacacaaactgcgatttgtattatttttgaacgttatcaggcgggtagataggctgtattaaaaaggccctcgaacctggacgaagattaatccaggccgatttggcgaactcgcgacattaaatcaggatcaatgcacgcccagacgccaggcgaagtagatttcttcttttaattcagcagaagagagagtaagcaggtcagcaaattcaagttctaattgtttcagacgcttgagatattgggcaggtgaaagattgctttggtcacggcgtaaaaattcaatggccagttgggtgggatcaagttgagtagacatagcatcctcgcttttagacaagacctgcacagtataccaccgtttactgtgcagataataaccaaaagcaatatgcgtcacacttttctggtgacaacgtcacaaaatagcggtcgtcaatcgtgacgaacagcacaaacgccctttctcatcgaagatttcaatctgccagacctggtgacgcgaaccgagatgcaacggtttgcatacgccgcgcacccgcccttctcgtgccgagcggacgtggttagcattgatttccagaccaaccactttttgctcaccttcggtacataaataaccggcaacggaaccgatactttcggccagtaccacggatgcacctccatgcagcaacccgaaaggctgctttgtccgtgagtctactggcattgtcgcttcaagggtgtcatcaccaatatgttcaaagcgaatatccagcaatcccaccatgtttccttcccccatagcattcagtgcttccagggtgatttttcgtttccatatcatttaataatctccagtaaagcctgcacaggatggcgtacccctgtgccttcaacccgttttacctgactacggcaggaatatccggtcgccagacagcggttacgcggcagtcgctgcatagcctgatgccaggataattcatagatcccgagcgaatttttatggtttttcgcttcatgtccgtaagtccctgccatgccgcagcaccccacgctgacattttccagtttcgcgccaaaacgggcaaatattgccgcccattgtgctggcgcgcctggcaaggcggtaacttcggtacagtgaccaaagaaataccatgattcaccgctgactgtagccactggctgtgagtcaagtgcgcttgccagccattcatttgccagtaagacgttaaactcgccacgctcctcgcccagagccagtttatattcatcgcgataacaaagtaccagcgccgggtcgacgcctaccattggcatacccagcttcgccatacggttgaggaaatccgccgtctttttcgccgtcttcgcaaaacgattaagaaaacctttgatatgctgggcttttccatttggcgaaaatggcagtaacacgggctggaaacctaatttttcgaccagacggacaaaatccgccaccacttgagcatcgtaatagctggtaaaggggtcctgcaccaccagcaccgtgcgcgctttctgctctgcattgagagcttcaagctgttccagcgtcatgtttgccgagcgatgccccaccatttgttgttgtagcgaggggaccgacagcagcggcaaatcaaccatgccgatatgtttttccgagagtttgcgcaccagcggctggttaatgaagaagttaaaggttttcggcgcgcgtgccatcagcggtgcgtaactctcaaccgtagcgacgaggtggtcgcgcagcgggcgtaaataacgggtgtgatagagttgcaggaaacgagagcgaaactccggcacatcaattttgatggggcactgagtcgaacaagctttacaggccagacagcccgacatcgcctctttgacttcgtgtgagaagtcatattcgcctttattcgcatgccaactattgcgcgtgcgggcaattaacgtccgcaaactgacgccggattcaggcagttcttgttccagtttgagtgggtcaacgccgcgatccgccaacaaacgcagccattcacgtaccagcgttgcgcgccctttcggtgaatgaatccggttctgggtgatcttcatcgacgggcacatcggactacgagcatcaaagttgaagcataaaccgttgccgttacactccattgcaccacgccactgctggcgtaccgcaatggggatctgtcgatcgaatgtaccgcgcttcaccgcgtccactttcatcatcggcgcatcgagaccttctggcgggcaaatcttcccggggttgagtcggttatgcggatcaaacgccgctttcactttacgcagttctgcaaaaagttcctcaccaaaaaacgccgggctgtattcggcgcgaaaacctttgccgtgttcgccccacaacaaaccaccgtatttcgcggtaagcgccactacatcatcagagatttgcttcatcaaaatctcctgttgcggatcgcacatatccagtgctggacggacgtgcaagacacctgcgtcgacgtgaccgaacataccgtagcttaagccgtggctgtcgagcagcgcgcgaaattcagcaatataatccgccaggtgttccggcggtacgcaggtatcctcagcaaacggaattggcttagcagcacctttggcattgccaagcagaccaacggcttttttgcgcatcgcatagatacgttcaacacccgccagctcgcggcacacctgccagccgatcactcctgcctgttggctggcaatcagctcatcaagccgcacacagagtgcattaactcgctcgtcaatcagtgcctcatcatcaccggcaaattccacaatgttcagcccgagcatctctttatcaggcacatcggtaatcaactcgctgacggaatgccagacaatatcttcccgcgccagattcagcacttttgagtccaccgtctctaccgaaagcgcccgcgcctcaaccataaacggcgcgttacgcagcgcggagtcaaaagagtcatatttgacgttcaccagacggcgtactttaggcaagcgcgtaatatccagtcgcgcttcggtaataaaggccagcgtcccttctgaacccgtcagaatgcgcgtcaggtcgaactcggtcatctcatcgttaaagacatgacgcagatcgtaaccggtaagaaagcggttaagcttggggaagttgtcgatgattaactggcgttgctgacggcaacgttgataaaccgtgttataaattcgcccgattgtggtattggatttacccagcgtttccgccagttcgacgggtaaaggttgcgtatcgagaatatcgccccccaacaacaccgcgcgtacgccaagtacgtgatctgacgttttgccatagaccagcgatccctgaccggatgcatcggtattgatcatcccgccgagcgttgcccggttgctggtcgaaagttctggcgcaaaaaagtagccaaagggtttcaggtactgattgagttggtctttaatcaccccggcctcaacgcgcacccagccctcttcagggttaatttcgatgatgcggttcatatggcgggacatatcaacaataatcccctggttgagcgcctgaccgttagtgccggtgccgccgccgcgaggggtaaagatcaacgatgaatagcgttcctgcgcggcaagacgggcaattaacgccacatctgcggttgaacgcggaaataccaccgcatcggggagaagttggtaaatactgttgtcggtcgacattgtcagacgatcggcatagcttgttgccgtatcgccggtaaaaccctgttgctccagctcttgcaaaaaattaagcaccagttgaacgacgccgggtgcctgggaaatctgtggaatcattatattgaccctttcctgcggtctgtgatgagagattaatcgtttgcgtgttgcctgagttgttgtaccacatttttttcttacacgcccatcagaattaagggcagaatcgacctgttaaaaaccgctgaaattgctcatcattatgcaggtgagtttcgcgtgttcacgtcgcgtcgacgatttgacgcacaaaaaaggtgaaaagtagttatggtaaatgttcgtcagcccagggatgtcgcacaaattctgctttcggtgctgtttttagccatcatgattgtggcatgtctgtggattgtacaaccctttattctcggctttgcatgggccggtacagtggttatcgccacctggccggtattgttacgtttgcaaaagatcatgtttggtcgccgctctctcgccgttctggtgatgacgctgttattagtgatggtgtttatcatccctattgctttgctggttaacagtatcgtcgacggcagcggcccgctaattaaagccatttccagtggtgacatgacgttacccgatctggcgtggcttaataccattccggtgattggcgcgaagctatatgcaggctggcacaatttgctggatatgggggggacggcgatcatggcgaaagtccgtccttatattggcaccaccaccacctggttcgttgggcaggcggcgcatatcgggcgctttatggtgcattgtgcgctgatgcttctcttcagcgccctgctgtactggcgcggtgaacaggtggcacaaggcattcgccattttgcaacccgtctggcaggcgttcgcggagatgccgccgtgctgctggcggcacaggctatccgcgcggtggcgctgggtgtggtggtgacggcgttagtacaggcagtgcttggcggtatcggcctcgccgtatccggcgtaccttatgcaactttgctaacggtgttaatgatcctctcctgccttgtccagcttggaccgttgccggtactgattccggcgattatctggctctactggactggcgataccacctggggaacggtactgttagtttggagcggtgtggttggcacgctcgataacgtcatccgcccaatgttaattcgcatgggtgccgatttaccgctgatcctgattctctctggcgttattggtggtttgattgctttcgggatgatcggcctgtttattggtccggttctgttagccgtttcctggcgtctttttgccgcgtgggtggaagaagtcccaccgccgacggaccaaccggaagaaattctcgaagaacttggcgaaatcgagaaatcgaataagtaatttctcatcaggcggctctgccgcctgattgttaacccctgctaattgatatttgcttgctcttccccatattttcctgcttaccgccattcagctggtagtacctgtcgcaaattctttacagtttttaaactaatgagacgaatctgatcgacgcaaaaagtccgtatgcctactattagctcacggttataaatcaacatattgatttataagcatggaaatcccctgagtgaaacaacgaattgctgtgtgtagtctttgcccatctcccacgatgggcttttttttaacatttttccgcttcgctacctcgcccctcactctttccaataatgttgcacaagatactgtgactctcttcaagccgtcagcaggctgataatgttatttatattttattgtttatttcatgcagccattacacgatgaacgcttatgaactccaggcacttcgccatatttttgccatgactattgatgaatgcgcgacctggattgcccagaccggtaacagtgaaagctggcgtcagtgggaaaatggcaaatgcgccattcctgattgtgtagtcgagcaactgttggctatgcgtcagcaacgaaaaaaacatcttcatgccatcatagagaaaataaataaccgcatcggcaacaacaccatgcgttttttccccgacttaaccgcgtttcaacaagtctaccctgatggcaattttattgactggaagatctatcaatcggtagccgctgaattatatgcacacgatctggagcggctttgttaatttctccacagaaaggaattgtcgttgttacaacaataatgaacggatactgacacaacatcgctacactttttaaagcacctttgctaagtagaacctatgaaaaatccctattaccctaccgcacttgggttgtattttaattacctggtgcatggtatgggcgtcattttgatgagcctgaatatggcctcgctggagacgctttggcagactaatgccgcgggcgtctcgatagttatctcatcactgggcattggtcgattaagtgtcttgctttttgcaggattattatccgatcgctttggtcgccgcccttttatcatgctcgggatgtgctgctatatggccttcttttttggcatcctgcacaccaataacatcattatcgcttatgtttttggctttctggcgggaatggcaaacagttttctcgatgcaggcacctatcccagtttgatggaagcttttccacgctcaccgggtacagccaatattttaattaaagcatttgtttccagcggacagtttttattaccgctaattatcagcctgttagtgtgggctgaactgtggttcggttggtcctttatgattgccgcaggcattatgtttattaacgctctgtttttataccgttgtacgttcccaccccatccgggtcgtcacttacctgtcataaagaaaaccaccagctctacggaacatcgctgttcaattatcgatttagccagttattccctatatggctatatctcaatggcaacgttttatctggttagccagtggctggcacaatacggacaatttgtcgctggcatgtcatacaccatgtcgatcaaattactcagtatctacaccgtgggttcgctgctgtgtgtatttattactgctccacttattcgtaataccgttcgcccaacaacattactgatgctgtacacctttatctcatttatcgccctgctcaccgtctgcctgcatcccacattttatgtggtgataatatttgctttcgtcatcggttttacctccgcaggcggtgttgtacaaattggcctgacgttaatggcggaacgttttccctacgctaaaggaaaagcaacggggatctattacagtgctggcagcattgcaacatttaccattccgttgattacggctcatctttcgcaaagaagtattgccgatattatgtggttcgataccgccatcgctgctatcggctttatactggcactgtttattggcttacgcagtcgcaaagaaacgcggcatcacacgctaaaggaaaatatcgctccgggtgggtaatgcaatattcttttcaggttatgcaagatcttacggataaataactctttctgcgctaactaaggaaaatcgcgatcaaaaacaaactatgacatgcaatattcctggaaacataaactttatgccatgtacccagggaaaatcatcttcagtatagtaattatgtaaaccgtcggagaacaatacgtacggtaacgaaattatctttcagcaaggagctgtgaaaatgtctcaaaataaggctttcagcacgccatttatcctggctgttctttgtatttacttcagctatttcctgcacggcattagtgttattacgcttgcccaaaacatgacatctttggcagaaaagttttccactgacaacgcgggcattgcctatttaatttccggtatcggattggggcgattgatcagtattttattcttcggagtgatctccgataagtttggtcgtcgggcggtgatattaatggcagtaataatgtatctgctattcttctttggtattcctgcttgcccgaatttaactctcgcctactgtctggcagtgtgcgtaggtatcgctaactcagcgctggatacgggtggctaccccgcgctcatggaatgctttccgaaagcctctggttcggcggtcatactggttaaagcgatggtgtcattcgggcaaatgttctacccaatgctggtgagctatatgttgctcaataacatctggtacggctatgggctgattattccgggtattctgtttgtactgatcacgctgatgctgttgaaaagcaaattccccagccagttggtggacgccagcgtagctaatgaattaccgcaaatgaacagcaaaccgttagtctggctggaaggtgtttcatcagtactgttcggtgtagccgcattctcgaccttttatgtgattgtggtgtggatgcccaaatatgcgatggcttttgctggtatgtcagaagctgaggcattaaaaaccatctcttattacagtatgggttcgctggtctgtgtctttatttttgccgcactactgaaaaaaatggtccgtcccatctgggctaatgtatttaactctgcactggcaacaataacagctgccattatctacctgtacccttctccattggtgtgtaatgccggagcctttgttatcggtttctcagcagctggcggcattttacagctcggcgtttcggtcatgtcagagtttttccccaaaagcaaagccaaagtcaccagtatatatatgatgatgggtggactggctaactttgttattccgctgattaccggttatctgtcgaacatcggcctgcaatatatcattgttctcgattttactttcgcgctgctggccctgattaccgcaattattgtttttatccgctattaccgcgttttcattattcctgaaaatgatgtgcggtttggcgagcataaatttagcacccggttaaacacgattaagcatagaggttaaaggagttaattatggatgttaccgcaaaatacgaattgattgggttgatggcctatcccatccgccacagtttatcgcccgaaatgcagaataaagccttagaaaaagcgggattgccatttacctatatggcctttgaagtggataacgatagttttcccggagcaattgaaggattaaaagccctcaaaatgcgcggaactggtgtatcaatgccgaacaaacaactggcgtgtgaatatgttgatgaattaacgccagcagccaaactggtgggtgccatcaacaccatcgtaaatgatgatggctatctgcgtggctataacaccgacggcacgggccatattcgcgccattaaagagagcggttttgatatcaaaggcaaaacgatggtgctgttaggggccggaggtgcctcaacggcaattggcgcgcagggggcaattgaaggtttaaaagaaattaaactctttaaccgtcgggatgagttcttcgataaagccctcgccttcgcgcagcgggttaacgaaaacaccgattgcgtcgtgacagtcaccgatctcgccgatcagcaagcctttgctgaagccctggcttccgccgacattttaaccaatggcaccaaagtgggtatgaaaccccttgagaatgaatcattggttaatgatatcagtctgttacatccgggacttctggtcactgaatgcgtgtataacccgcatatgacgaagttattgcagcaggcgcaacaagcgggttgcaaaacgattgatggatacggcatgttgttgtggcaaggggctgaacagttcacgttatggactggcaaagatttccctctggaatatgttaaacaggtcatggggttcggtgcctgacaggctgaccgcgtgcagaaagggtaaaaaatgaaaaccgtaactgtaaaagatctcgtcattggtacgggcgcacctaaaatcatcgtctcgctgatggcgaaagatatcgccagcgtgaaatccgaagctctcgcctatcgtgaagcggactttgatattctggaatggcgtgtggaccactatgccgatctctccaatgtggagtctgtcatagcggcagcaaaaattctccgtgaaaccatgccagaaaaaccgctgctgtttaccttccgcagtgccaaagaaggcggcgagcaggcgatttccaccgaggcttatattgcactcaatcgtgcagccatcgacagtggcctggttgatatgatcgatctggagttatttaccggcgatgatcaggttaaagaaaccgtcgcctacgcccacgcgcatgatgtgaaagttgtcatgtccaaccatgacttccataaaacgccggaagccgaagaaatcattgcccgtctgcgcaaaatgcagtccttcgacgccgatattcctaagattgcgctgatgccgcaaagtaccagcgatgtgctgacgttgcttgccgcgaccctggagatgcaggaacagtatgccgatcgtccaatcatcacgatgtcgatggcaaaaactggcgtaatttctcgtctggctggtgaagtatttgggtcggcggcaacttttggtgcggtaaaaaaagcctctgcgccagggcaaatctcggtaaatgatttgcgtacggtattaactattttacatcaggcataagcaataatatttcggcgggaataccctctcccgccgaactaaaaagagtatttttaaccgtatttaataaaaatatttcgtgagtctctgtgcgctaattctccatctggcgtagggaaaatcacacctgaatcaggaattaacaatgaaacctgtaaaaccacctcgtattaatggacgagtgccggtcctgtcggcacaggaagcggtgaattatattcccgacgaagcaacactttgtgtgttaggcgctggcggcggtattctggaagccaccacgttaattactgctcttgctgataaatataaacagactcaaacaccacgtaatttatcgattattagtccaacagggcttggcgatcgcgccgaccgtggtattagtccgctggcgcaagaaggtctggtgaaatgggcattatgcggtcactggggacaatcgccgcgtatttctgaactcgcagaacaaaataaaattattgcttataactatccacaaggtgtacttacacaaaccttacgcgccgccgcagcccaccagcctggtattattagtgatattggcatcggaacatttgtcgatccacgccagcaaggcggcaaactgaatgaagtcactaaagaagaactgattaaactggtcgagtttgataacaaagaatatctctattacaaagcgatagcgccagatatcgccttcattcgcgctaccacctgcgacagcgaaggctacgccacttttgaagatgaggtgatgtatctcgacgcattggttattgctcaggcggtgcacaataacggcggtattgtgatgatgcaggtgcagaaaatggttaagaaagccacgctgcatcctaaatctgtccgtattccgggttatctggtggatattgtggtggtcgatccggatcaaacccaactgtatggcggtgcaccggttaaccgctttatttctggtgacttcacccttgatgacagtaccaaacttagcctgcccctaaaccaacgtaaattagttgcacggcgtgcattattcgaaatgcgcaaaggcgcagtggggaatgtcggcgtcggtattgctgacggcattggcctggtcgcccgggaagaaggttgtgctgatgactttattctgacggtagaaacaggtccgattggcggtattacttcacaggggatcgcctttggcgcgaacgtgaatacccgcgccattctggatatgacgtcccagtttgatttttatcacggtggtggtctggatgtttgttatttgagttttgctgaagtcgaccagcacggtaacgtcggcgtgcataaattcaatggtaaaatcatgggcaccggtggatttattgatatcagttccacttcgaagaaaatcgtgttctgcggcacattaactgcgggcagtttaaaaacagaaattaccgacggcaaattaaatatcgtccaggaaggacgggtgaagaaatttattcgggaactaccggaaataactttcagcggaaaaatcgctctcgagcgagggctggatgttcgttatatcactgagcgcgccgtattcacgctaaaagaagacggcctgcatttaatcgaaatcgctcctggcgtcgatttacaaaaagatattctcgacaaaatggatttcaccccagtgatttcgccagaactcaaactgatggacgaaagattatttatcgatgcggcgatgggttttgtcctgcctgaagcggctcattaacaggagtataatgatggatttctctttaactgaagaacaagaactgctgctggccagtattcgcgaactgattacgactaactttccggaagagtatttccgcacctgcgatcaaaacgggacatacccgcgtgagtttatgcgggcactggcggataacggtatttccatgcttggcgtgccggaagaatttggtggtatccctgcggattacgtcacccaaatgctggcgctgatggaagtgtcaaaatgcggtgctccggcatttttgattaccaacggtcaatgtattcacagtatgcgccgtttcggttctgcagagcagctacgtaaaacggcagagagcaccctggaaacgggtgatcccgcctatgccctggcattgacggagccaggcgcaggctcagacaacaacagtgccactaccacttacacgcgtaaaaacggcaaggtttacatcaacggacagaaaacctttattaccggtgcgaaagagtatccatatatgctggtgttggcgcgcgatccgcaaccgaaagatccgaaaaaggcctttactctgtggtgggtcgactccagtaagcccggcattaaaatcaatccactgcataaaatcggctggcatatgctcagcacctgcgaagtctatctcgacaacgtggaagttgaagagagcgacatggtgggcgaagaaggaatgggtttcctcaatgtgatgtacaactttgagatggagcgcctgatcaacgccgcgcgcagcaccggctttgccgagtgtgcctttgaagatgccgcccgctatgccaaccagcgtatcgcttttggtaagcccattggtcataaccagatgatccaggaaaaactggcgctgatggcgattaagatcgacaacatgcgcaacatggtgttgaaagtggcatggcaagccgatcagcatcagtcactgcgcaccagcgcggcgctggcaaaactgtactgcgcacgtaccgcaatggaagtcattgatgatgcgattcaaatcatgggcggtctgggctataccgatgaggcgcgcgtctcccgcttctggcgtgatgtccgttgtgaacgtatcggcggcggtacagacgaaattatgatttacgtagcaggtcggcagatcctgaaagattatcagaacaaataatctgcaggcggcgcagcctcttaacaaactgcgccgccagatttatccggcaagacttaccggttgaggaaattcagataggatttcttgttccgcaaaacagtttttaaattgcctgcggtaatcgctgggcgaacagccgacatggcgcaaaaacagtttggcaaagtgatcgacattttcataacccacacgccaggagatctctgcctgagataattcagtattagtgagtgaccatttcgcttccgtcatacgccgttgaataacatagttaataggggaaatacgatactctttggtaaattcatggcagatataactgacgctggcacgaaattttttcgataactgctctaaagtgattttttcgcgatagttattattcagatagaaaagaatatcttttatcagaacatcttttttaatatatccctgctccgaacgataagcatttttaaagttttcgtagtaaagaattgctaacgtataggcaaatgcgtcccataacgaagatgtttggctatttttactttgcggcaaaatcacacttagctcattaaataaggttttaatgacttcttttccctgtcctgcggcaattaccgggcaagaatgcggttgcagtagctgattttcctcagccccctgaaactgaaagccgtacagcgcacaggtacacgtcgttgccggatcgttaacgtcagaggccaccgcatgcaacctgccacgttctatcaccacaatgtcatcggcatgcgcgacatataacgaagaatcgatggtaaaccttgctacccctttcttgacgtaaatcagctcggtttcattgtcatgaacgtgatgtccagactcccattttggatcatcgctaaatgcgaaacgtgaaagccgtggcgttttaccggcgacaaacagcgtttcactggcattatcaaaacagcgttgatacatgacaacctccctattccatgagcaaacaaaaacaatatatgccggataaaatacggcgtgtattgcggttatacaaccgcgtttagcgagagctaaacaagattatttacactgaatgcaagattgcacggtcatggaataactatattgccgcaaattgcacttttgttttagcgatcgcattttttttgcaagattgttggcaaggaaaacagcttgctccgtcgaaaaccccgcaccgctatcgcacactattttcaggccatttttaccttccatcagagatggttccgtatgcgactcacaggagaaatcatgaaaataataacctgctttaagctggtgcctgaagaacaggacattgttgtcactccagaatacaccctgaatttcgacaatgccgacgccaaaatcagccagttcgatctcaatgccattgaagctgcaagccagcttgcaacagatgacgatgagatagccgcgctgaccgtcggcggctctttgttgcagaactcgaaagtgcgcaaagacgtgctatcccgcgggccgcacagcctgtatatggtgcaggatgcacaacttgagcatgcactgcctctcgataccgcaaaggcgctggcgacagcagttgaaaagatcggcttcgatttactgatctttggtgaaggttccggcgacctttatgcccagcaggttggcttgctggtcggagaacttctgcaacttccggtgattaatgcagtgagtgctattcagcgtcagggcaatacactggtgattgaacgcacgcttgaagatgatgttgaagttattgaactctctgttccagccgtgctctgcgtcacctccgatattaacgtaccacgtattccttcgatgaaagccatcctcggcgcgggtaaaaaaccggtaaatcagtggcaggcaagtgatattggctggagccagagcgcaccacttgctgaactgaccggtattcgcgtaccgccgcaaacaaaacgtaagcacatcattctcgataacgattcgccggaggccattgccgagctggcggaacatctgaaaaaagccctgaactgaagcctacggagaagaaacgatgagtcaattaaacagcgtctgggtctttagcgataatcctgaacgttatgctgaactgtttggcggcgctcagcaatggggccaacaggtgtatgccattgtacaaaataccgagcaggcgcaggcggttatgccttatgggccaaaatgcatttatgttcttgagcaaaacgacgcgctgcaacgtactgaaaattacgccgaaagcattgctgccctgctgaaagataaacaccccgctatgttgctgttggccgcgacgaaacgtggtaaagctctggccgcacggttaagtgtgcaactgaatgcggcgctggtgaacgatgccacggcggtggatattgtcgatggtcacatttgcgccgaacaccggatgtatggcgggttagcgttcgctcaggaaaagatcaacagcccgctggcgatcattacccttgcacccggtgttcaggagccgtgcacccgtgatatctctcatcagtgcccgacagaaacggtaccttatgttgccccgcgtcatgaaattctctgtcgcgaacgccgtgcgaaagcggcaagcagcgtggacctgagcaaagcaaaacgtgtggttggcgtcggtcgtggtctggcggcgcaggatgacctgaaaatggtccacgaactggcggcagtgctgaatgctgaagtcggctgttcacgtccaattgccgaaggcgagaactggatggagcgtgaacgttatatcggtgtctccggcgtgttgctgaaatccgatctctacctgacgctggggatctccgggcagatccagcatatggttggcggcaacggcgcaaaagtgattgtcgccattaataaagataaaaatgcgccaatcttcaactatgccgactacggtctggtgggcgatatctacaaagtcgtccctgccctgattagccagttgaatcgctaattccctttcaaccacatctcccgctgtaaacgcagcgggaagggagcataacgcatgtcggatgacaaatttgatgccattgtggtcggtgcgggcgttgccggtagcgttgccgcactggtcatggcgcgagccgggctggatgtcctggtgatagaacgcggcgacagtgccggatgtaaaaacatgaccggcgggcgtctttatgcccacacacttgaagcaattattccaggctttgcagcatcagcgccggtagaacgcaaggtcacacgcgagaaaatctccttcttaaccgaagaaagcgccgttaccctcgattttcaccgcgagcaaccagatgttccgcaacacgcgtcttataccgtattgcgtaatcgtctggacccgtggttgatggaacaagccgagcaggcgggcgcgcagtttatcccgggcgtacgcgtcgatgcgctggttcgtgaaggaaacaaggtcactggcgtccaggccggggatgatattctcgaagcgaatgtggtgattctggctgatggcgttaactcgatgcttggccgctcgctgggaatggtttccgcttccgatccgcatcattacgctgttggtgttaaagaggttataggtctgacaccagaacagatcaacgatcgctttaatgttacgggcgaggaaggtgccgcctggctgtttgccggttccccttctgacggcctgatgggcggcggattcctctataccaacaaagattccgtatcgttggggctggtttgtggattgagtgatatcgcccatgcgcaaaaaagcgtgccgcaaatgctggaagattttaaacaacaccccgccattcgcccgctgattagcggcggcaaactgcttgaatattccgcgcatatggtgccggagggcggtctggcaatggtgccgcagctggttaacgatggcgtgatgatcgttggtgacgccgcaggcttctgcctgaatttgggttttacagttcgcggcatggatttagccattgcatcagctcaggctgccgccacaacggtgatcgccgccaaagaacgcgcggatttctccgccagcagtctggcgcaatacaaacgtgagctggaacaaagttgtgttatgcgcgatatgcagcatttccgcaagatcccggcgctgatggaaaacccgcgcctgtttagccaatacccacgaatggtcgccgacatcatgaacgatatgttcaccattgacggcaaaccaaaccagccggtacgcaaaatgatcatgggacacgcgaagaaaattgggctgatcaacttgctgaaagatggcattaagggagcaaccgcgctatgagccagaacgctacggttaacgtcgacatcaaattaggcgtcaataaattccatgttgatgagggccacccgcatatcattttggcggcaaatcccgatatcaatgaattccgtaaattaatgaaagcttgccctgccggactttataagcaggatgacgcaggaaacattcatttcgattccgccggttgtctggagtgcggcacctgtcgggtgctgtgcggcaacactattctcgaacagtggcaatatcccgcaggcaccttcggtattgaatttcgctacggctaatcatgcatcccacaggcccgcatctcgggcctgatgttctgtttcgagagtccaaaatgaaagtgacattaacgttcaacgaacaacgtcgtgcggcgtatcgtcagcaagggttatggggcgatgcttcgctggccgattactggcagcagaccgctcgtgcgatgccagacaaaattgccgtggtcgataatcatggtgcaacgtacacctatagcgcgctcgatcacgccgcgagctgtctggcaaactggatgttagcgaagggtattgaatcaggcgatcgcatcgcatttcaactgccaggctggtgtgaatttaccgttatctatcttgcctgcctgaaaaccggtgcggtttccgtgccgctgttaccttcctggcgggaagcagaactggtgtgggtgctcaataagtgtcaggcaaaaatgttctttgcaccgacgttgtttaaacaaacgcgtccggtagatttaatcctgccgctgcaaaatcagcttccacaactacaacaaattgtcggcgtggacaaactggctcccgccacctcttccctctcattaagtcagattctcgccgacaatacccctctgaccacggcgataacgacccacggcgatgaattagccgctgtgctatttacctccggaaccgagggtctgccaaagggtgtgatgctaacgcataacaatattctcgccagtgagcgggcttattgcgcgcggctaaatctgacctggcaggatgtctttatgatgcctgcgccacttggtcacgcaacgggctttctgcatggcgtaacagcaccttttttgattggtgctcgcagcgtgttgttagatattttcactcctgatgcgtgtctcgcgctgcttgagcagcagcgttgcacctgtatgctcggcgcaacgccgtttgtctatgatcttttgaatttactagagaaacaacccgcagacctttcagcgctgcgcttctttctttgcggaggtaccacaatccccaaaaaagtggcgcgagaatgccagcagcgcggcattaaattattaagtgtttatggttccacagaaagttcgccgcatgcggtggtgaatctcgacgatcctttgccgcgctttatgcacaccgacggttacgctgccgcaggtgtagagattaaagtggtcgatgacgcacgcaagactttaccgccaggttgcgaaggtgaagaagcctcgcgtggccccaatgtgtttatggggtattttgatgaacctgaattaactgcccgtgcgctggatgaagaaggctggtattacagcggcgatctctgccgcatggatgaggctggctatataaaaataaccgggcgcaagaaagatattattgtccgcggcggcgaaaatattagcagccgtgaagtagaagatattttattgcagcatcctaaaattcacgatgcctgtgtggttgcgatgcccgatgaacgtttaggtgaacgttcatgcgcttatgtcgtgctgaaagcgccgcatcattcattatcgcaggaagaggtggtggctttttttagccgtaaacgggtcgcaaaatataaatatcctgaacatatcgtggtaatcgaaaaactaccgcgcactgtctcaggtaaaatacaaaagtttttgttaaggaaagatattatgcggcgattaactcaggatgtctgtgaagagattgaataagtttcatcttcggggatcacataaacccggcgacaaaacgccgccgggtatttattttatttcttcagttcagccaggcttaaccaggtttgcaccacggtgtccgggttcagagacaggctatcgatcccctcttccatcaaccatgcagcaaagtcttcgtggtcggatggaccctgaccgcaaatcccgacatatttgccctgtttcttcgcggcacgaatcgccatcgacagcagtgctttcaccgcatcgttgcgctcatcgaacagttcagacaccacgccggagtcacgatccagaccgagcgccagctgcgtcatgtcgtttgagccaattgagaagccgtcgaaatattccaggaactgctctgccagcaaggcgttggacggaatttcacacatcatgatgattttcagcccgttctcaccacgtttcagcccctgatgcgccagttcctcaaccaccgctttcgcctgatcaacggtacgcacgaacgggatcatgatctcaacgttagtcagccccatgtcgttgcgcacacgtttcactgcttcacactccagcgcgaagcagtcgcggaagctgtcggaaacatagcggcccgcgccacggaagccgagcatcgggttctcttcatctggctcgtaacgctcaccaccgaccagattggcatattcgttcgatttaaaatcagagagacggacaatgacgcgcttcggataaaacgcggcacccagcgtcgcgatcccttcagtcagacgaccaacgtaaaattcacgcggagaatcaaaacctttcatcatctcgcggatttcgttttgcaactgcggttcctgatcgtcaaactcaagcagtgcgcgtgggtggacgccaatcatacggttgatgataaattccagacgcgcaaggcccacgccttcgttcggcaggcaggcgaagtcgaaagcacggtccgggttaccgacgttcatcatcaccttcaacggcaggtccggcatcgtttctacgctggagcttttcacgctaaattccagcaactccgcatagacgtaaccggtatcaccttcggcacaagaaacagtgacgttctcgccgtctttcatccgttctgttgcatcaccacagcccactaccgccggaatgccgagttcacgagcgatgatcgccgcgtgacaggtacgaccgccacggttggtgacgatggcagatgctttcttcatgatcggttcccagtccgggtcggtcatgtcagtaaccagcacgtcgccaggttcgatgcggttcatttcgctgatgtcatggatgactttcaccggacccgcgccgatgcgatgaccgatagcacggccttcggcgataatcttaccctgtgaatgcagcgtataacgctccatgacctgaccgcgtgagcgcacggtttccggacgcgcctgcacaatgaacagtttgccggtgtggccatctttcgcccactcaatatccatcgggcgaccgtagtgtttctcaatttgtacggcctgttttgccagttcctgcacttcttcgttggtcagcgagaagatgtcacgctgttcctgcggtacgtcttcgattttaacctgcttgccgtgctcctgggtcggcgcgtaaaccatgcggatttttttcgaccccatggtgcggcgcacaatagccgggcgattcgccgcaagtgtcggtttatgcacataaaactcatccgggttaaccgcaccctgcacgaccatttcaccaaggccccatgcggaagtgataaacaccacctggtcaaagccagattcggtatcaatggagaacatcacgccagaagatgcgaggtcggagcgcaccatccgctgaacaccggcggagagcgctacgccacgatggtcgtaaccctggtgcacacgataagagatggcgcgatcgttaaacagagaagcaaatacatgcttcactgccacgagaacggcgtcaaaaccctgaacgttgaggaaagtttcctgctgaccggcaaaagaagcgtccggcatatcttctgcagtagcggaggaacgcaccgcaaacgaagcgttttcgtcatcggcggaaagctgtgcataggcttcgcggatggcgttttccagctcaggctggaagggagtgtcgataatccactggcggatttgcgcgcccgctttcgcaagctgggtaacatcgtcaatatccgttttatccagcagttcataaatgcgctggtttacgccgctttggtccagaaactggttaaacgcgtcggcggttgtggcgaaaccattcggaacggaaacacccattccggaaaggttagtaatcatttcacccagggaggcatttttgcccccaaccctgtctacatcattcatgccgagttggttataccaaagcaccagcggtgacgagccattgttggacatcgaacaatccttttgtgataaatgaacggtttgagaaacacatttctgcgcatttatctttgcatatttaaccggatgaaaaaaacggtgaatcgttcaagcaaatatatttttttactttttaagactgatcccagcgttgcgcaaatctgctctcttcgacaatttccacataaaccatcggtataaacgaaaccataaaaatgaaatgctgttttcataaaaaataaaatttaagtttcattttataaaccagacataacgttctacgcttctgtacgtttttaatttatgctttcatagaattatgtctgcatcacgggaagaacaaaatggataatgctgttgatcgccacgttttttatatttctgatggtacggcaataactgcggaggtattaggacacgcagtaatgtcacaatttcccgtcactatcagcagcattacgctgccgtttgtcgaaaatgagagccgtgcacgggcagtgaaagatcagattgacgcaatttatcaccagacaggtgtgcgcccgctggtcttctactccatcgtgttgccggagattcgcgctatcatcttgcaaagtgaaggcttttgccaggatatcgttcaggcgctggttgccccgctacaacaagagatgaaactggatccaacgccgattgctcatcgtacccatggccttaaccctaataatctcaataaatatgatgcgcgcattgcggcgattgattacacccttgcccacgatgacggtatttcgttgcgcaatctggaccaggctcaggtgatcctgctcggtgtttctcgctgtggtaaaacccccaccagtctgtatctggcaatgcaatttggtatccgcgcggcaaattacccctttattgccgacgatatggataatctggtgctacccgcgtcgctcaaaccacttcagcacaaattgttcggcctgactatcgacccggaacgtctggcggcgattcgcgaggaacgtcgggagaacagtcgctatgcctcgcttcgtcagtgcaggatggaagtcgcggaagtggaagcgttgtaccgtaaaaatcagatcccgtggattaacagtaccaattattcggtagaagagattgccaccaagatcctcgatatcatgggccttagccgccgaatgtactagagaactagtgcattaacttgtttttttgttatcatgctaaccacccggcgaggtgtgacacacctcgcacttgaaatcagctgcgattggtttatcgtgatgcgcatcacttcccggtagtcctgccgtagaagcaacaaatttctgagacttgtaatgaacagaactgacgaactccgtactgcgcgtattgagagcctggtaacgcccgccgaactcgcgctacggtatcccgtaacgcctggcgtcgccacccatgtcaccgactcccgccgtagaattgaaaaaatactgaatggtgaagataagcgactgttggtcattattggcccctgctcgatccacgatctcaccgctgcgatggagtacgccacccgtctgcagtcgctgcgcaaccagtaccagtcacggctggaaatcgtaatgcgcacctattttgaaaaaccacgaacggttgtcggctggaaaggactcatctccgatccagatttaaacggtagctatcgggtaaatcacggtctggagctggcgcgcaaattacttttacaggtaaatgagctgggcgtccctaccgcgactgagttcctcgatatggtgaccggtcagtttattgctgatttaatcagttggggtgcgattggcgcacgtactaccgaaagtcagatccaccgcgaaatggcttcggcactctcctgtccggtgggttttaaaaatggtaccgatggcaacacgcggattgccgtggatgctatccgcgcagcccgcgccagccatatgttcctctcgccagacaaaaatggtcagatgaccatctatcagaccagcggcaacccgtatggccacattattatgcgtggtggcaaaaaaccgaattatcatgccgatgatatcgccgcagcctgcgatacgctgcacgagtttgatttacctgaacatctggtggtggatttcagccacggtaactgccagaagcagcaccgtcgccagttagaagtttgtgaggatatttgtcagcaaatccgcaatggctctacggcgattgctggaattatggcggaaagtttcctgcgcgaaggaacgcaaaaaatcgtcggcggtcagccgctcacttacggtcaatccattaccgacccgtgtctgggctgggaagataccgaacgcctggtcgaaaaactcgcctctgcggtagatactcgcttctgaatgcgtgcccattcctgacgggatgggcatttctgcgcaacttgttgtcttctcaacaaattactacttgctctggcccgccataatattgataataagaatcattgttatataaattattattaatttttatgcgttatacggatagcagaaaactcacgcctgaaacggatgccagtcacaagaccgcttccccgcagcccatccggcgaattaccagccagacactgttaggtccggatggcaaactgattatcgatcatgacgggcaagaatatctgctccgtaaaactcaggctggcaagctgctgttgaccaagtagcctttaactcgagcagctgacttccagccgtttaccccagtcgggtggacgactgacatagtcatcatctctgtcgctgaaaggatttcgcaacgcctcatgcaggcggtgcaattccgtcatatcatccttttctgccgcttcaatcgcccgttgcgccaaccagttgcgcaacaccagagccgggttaacgctttgcatcagttgctgacgctcactatcggtaatctcgtcttgttgcaaacgcccccgataacgggcaaaccagtcatcaaatgccgcacgatcaataaactcatcacgtagcggtgacgccgcgctgtgctgctcggtcagactcagcatgcggaatgtgcgggtataatcgctgcgctctcgcgccatcagactgaataattcattaagtagcgcgttatcctctttttgctccgtcatgaagcccagtttctgccgcatccgttgtccataatgcgtcaacaaaacctgctgatagctgtccagggcctcattcagcgcatcaacggcaacaaatggtgacaatgtctgcgccagacgctgtaaattccacaacgcgacggcaggttgattatcaaagctgtaacgcccttgatgatccgagtgattacaaataaaaccgggttcgtaatcatcaagaaaaccaaacggcccgtaatcaagcgtcagccccagcagcgacatgttgtcggtattcatcaccccatgagcaaagccgaccgtctgccattgggcaattaacgaggcggtacgtgcgacaacatcggtaaaccagagacggtatttgtcctcctcatcatcaagatgtgaccagtaatgacgaatggcaaagtcagctaactgacgaaccttttccggctcgcggcgatagtaaaaatgttcgaaatgaccaaagcgcagatgacttggtgccacacgcatcagcatcgcgcctgactccaccgtttcccgatacactggcgaatcgctggtgacgatacttaaagcgcgggtcgtcggaatgcccagataatgcatcgcctcactggcgagactttctcgtatcgtcgaacgtaaaaccgcccgtccatcccccattcgcgaataaggcgtcaggccagcacctttcagatgccagtccattgtagtgccatcagcaagcagttgttcgccgagtaaaatgccgcgcccatcacccagttggcccgcccagacgccaaactgatgaccactgtaaacctgcgcaagtggtgacatacccggcagtaggttttcgccgccccagacacctgcgccatttttaaacagcgacgatggaatactcagcgtgttagccagttcggtattatgccaaatcagccgggcattatttaaaggcgtaggggaaagtgctgtataggtttctggcaattcatcgcgccagcgggtaataaaagacagggtcatagatcctcctgtttgatagtgtagacggttactctcgtcttaaacaccagcaaacaggagggttatcgctgaaccaacgtcgttatctgatttataggaaccgcaggccacaggcatccctggagagcatggaaatcaaaggggataatctgtgccaatatttctggcgtatcaatgccccccgcgatgatgcaattgcaacaaggggaaatttgcgcctggatcgcacgaataaacggttcgaaggagcgatgcgtgatttgttgctgaataaaacttttatccagcatgacgcgggtgaaaagaccatcaaacaccgctttcattgtgctattacctgctcccaaattacctaacacaaggggatacatttgcgataaggataaaagatcgcgattatcttttccttcattgaaatgcgggtaattctcattaatcaacagttcaataaacggatattttaatagttcgcctgcgaaattatccctgtctaataataatgtagccacttgtggcgttaaattaagccaggcaaagagtttatgttgaataaaaaagtgttggcatgattttagtaattccaactgttcagaaaataattgccaatgttgctccacggtaagttgcgctataacccgactcgtcgggatacgaaccgtaccatcttcactggagaaatgggtaattaactcaacgccgacaaggtcttgctggttatctcttatcggcaggaaatagcaatcagaatgataaagattctccaaaaaaatcttcatggtaaccttccctctcgaaggatgtttttcagtatccggctaaaagggatgaggccataagacataacaattacagaaggagtaactttcatttgttccatgttaaccactttttcaggggtcctttttttagattatcctgattataaacgaataatccatttacggaatttttgtctgcaaaatactactgtattcaggagtaaatggacggcgatgtatcatcgccgtccatttttcgacatactagattcgtctcgcctgccagaaatttttctgccaatagacattatcaagtgaggaacgcatcactcccttgctggtagaggcgtggataaattggttgttggtatcgtaaatacctacatgcaaaccattttgtccggaacccgttttgaaaaagaccaggtcacctggcagcaactcgtctttatcaatttgcgtgccaatagaggcttgttgcttggtttcacggggcagctgcaaatcgaaacgatcgcgcatcgtcacaaccacaaatcccgaacagtccacaccgcgccgcgtcatgccaccataacgatacggcgtgccatgccagctttgtagctggtcgttcaaaccggcaataacggtaatcgaatcagaaagtctggcatttggcggcggtgctttatggtggctacacccggccagaaacagtgctgtgatcaaaataaggcagaaacgcattccgtacggttcctctgttttttattcttgcattaatttagcgtcgtaattacccgattttcaagatactaatgaaatcagatggtcgaaatcagcattctgtgaccttcgatatccagacggcgaaaattcatcccataggcctgcgccagatttgccggcgtgagcacctcttctctgcgtccactggccagcatttttccaccttttagcaaccacgcccgatgcgcatgacgcaatgtgtggttgagatcgtgactgctcatcacaatcgccagtccttgctgacacagcgcgctcagaattttgtctaaggcgctttgttgcgcaacatcaagactgttcatcggctcatcaagaagcagcaattggcctgcgggattggcttgtggtgtgatttgcagcaccaccgcagcaagacgtacgcgttgccattcaccgccggaaagttgattggtgctacgtccgagtttgtcatcaagagccagcgcccctgcgacatcattcagtagttcggtacgcgttttatcgtgctgatgcagtgtcaggtagtgccagaccggcattgcaaacggcggcgtctgctgttgtgaaagataggcgcgatgcagcgcgagctttgttgcagaccatgcttccagtggttgccccgcgaactgaatgcttcccttaccgctggtcattccggccattcgcgccagtaaggtactcttacccgcgccattcggccccaccaggtgcaggatctccccagcccgaacctcgccagaaagcggccccaggcgggtggattccgcaacatcctgtaactgcatcacaatagacattattttgccaacgccagtttaatgctttccatcacaatgggatcttccggcgtcatatccggggaaaaacgctggatgacctttccgtccctgccaactaaaaatttctcaaaattccataaaatatcatcagggtacagcggtgcacgacctttgctgaccatacgggcatagaatccgctctcttccggcgcgactgcagtcggcgctgcggcaatcaatttttgatacagcggatggcgtccttcgccattaacttcaatcttactgaacatcgggaacgtcaccccccatgtggtggtgcagtaagttttaatctcttcatcgctacccggttcttgctccagaaactggttacacgggaatcccagcaccacaaaaccacgatcagcccaggctttctgaatattctccaactgctcatattgcggcgttaagccacactttgaggcgacattgacaatcaacagcacattaccggcgtacttctccagcgtggtcacttcaccgtcgatatctttcactacggtcgtcagaatggaatcttgcatcgtttctcctgggtgtggtcagtaaaaatcttagcttttaatcatagaccgtcttttgcggctaacgtcctgcttttaacaataaccagataaacaccggcgcacccaacgttgcggtgaccacgccaattggcagctctgcggcagctaatgccaggcgcgctacaatatcggccagcagcaatgcgctcgcccctgccagcgcgcagccgggaagtaatacgcgatgatcggttaaaccacacagccggagaatatgtgggatcaccagaccaataaagccgatagcacccgccagcgccacactgacgccaaccatccagccggtcgctgccaccagcacattgcgccagaaccacaggggtaaacccagttgccgcgccgagatctcgccaagtgctaacatattcatcggcctggactgacaacagatccacaacaatacggggatcaatgccaccatcagccagctttgccgccagtctacgccgccaaaaccgcccatcatccagtacatcagctgacgtaaatcaacagaggtggaaaagtagatagcccacgtcattagtgcgctacagataatccctaatgcaacgccagccagcaataaccgactggtcgaaagatgacgacgagcgaaacgtaagagtattaaagtgatgataagcgcgccagcaatcgcacacagccctagcgcccagttggggagttgcccttgcccaagtaataccgcggcgataagccccacgcctgcgccgttagagacgccaagtagtccaggttctgccagaggattttcaaacaacgcctgcattacagcgccggatatagccagcgccgcaccaaccagcaatacagccagcgtacgtggcaggcgaatttgccagacgaatagttcgccacgaggagaaaaccagtcacctggcaaaatccattgttcaccggcgcaaaggcttaagagaagcgccagcagcatcaaaactgacaggcataataaccagcgaatattttgtcgctgttgttggcgggcaagtgtcagcatggtatccgttctgctgaagtgtcatggcgttgattttacggtgactcttcgacagtgaaaagaaaaaaggccgcagagcggcctttttagttagatcagattactcgtctttgggcgaagcgttttcgacccggctttttaacttctgcccgggtctgaaggtcaccacgcgccgtgctgtaatgggaatatcctcgcccgttttcgggttacgtcccgggcgttgattcttatcacgcagatcgaagttaccaaaaccagagagtttcacctgttcgccgttttccagagcgcgacggatctcttcgaaaaacagttcaaccagttctttggcatcccgcttgctaagcccaagcttatcaaacagatattctgacatttcagcttttgtaagcgccataggttcaatccctcaatgatgcctggaatcgctcttttaatgcctctacacatttggcgacggtagcggcaatctcctcttcttcgagtgtacggctggtatcttgcaggatcaggcttatggcgaggctcttatacccctccgcaacacccttaccgcggtacacgtcaaataagtttacgccaactacctgatttacgccaactttcttacattcggataaaatatccgctgcgggaacgttttctgcgaccaccaccgcgatgtcacgacggttcgccgggaagcgagaaatctcgcgcgcctgaggcaccacgcggtctgcgagcttgttccactccagttcgaacaccagagtgcgaccgttaagatccagtttacgttccagttcaggatgaacaaccccaacaaaaccaatacgttcacctttcagataaatcgctgcggattgccccggatgcagtgccggattcgcttctgcacggaactcaacctcattcagtttaccggtcaggtcgagaacggattcaagatcgcctttcaaatcatagaaatcaacggtctcttttgccaggttccagtgctcttcgtaacggttaccgcaaatcacaccggctaacatcagatcctgacgaatacccaacggtgcctgagtatctggcacgaaacgcagaccgctttcgaaaatgcgtacacgattctgctgacggttctggttgtacaccacggttgccagcaggccggtccacagagaaagacgcattgctgacatttcaacagagatcgggcttggcagcagtaaggcttcaacgcctggatggatcatctgctgcactttcggatcaacgaagctgtaggtgatcacttcctgatagcctttgtcgttgagcagcgtttttacgcgcttgagcgacaggtcagcttcacggtgagtccccataatcaggcttgcctgtaccggctcatccgggatgttgttgtagccgtaaacacgcgcgacttcttcgaccagatcttcttcaatctccatgtcgaaacgccagctcggcgcaactgcctgccactcgtctttgccttcggtcacttcgcagccgagacgacgcagaatgtctgttacctgctcatcagcaatatgatggccgatcaggcgatccagtttgctacgacgtaaagtgatggttgcacgcttcggcagcgttgcttcgttagtgatatcaattaccggacccgcttcaccaccgcagatgtcgatcagcagacgggtcgcacgttccatcgctttgtgctgcagtgccggatcaacgccacgctcataacggtgagacgcatcagtatgcaggccatgacgacgagcacgaccggtgatagacagcgggctgaagaaagcgcattccagcaggacgttttgcgtttcgtcattcacgccagagtgttcgccaccaaagatgccgcccatcgccagcgccttgttgtggtcggcgatgaccagggtgtcagcattcagcttcgcttcagtaccatcgagcaataccagcgtttcaccctcttttgccatccgcaccacaatgccgccttcaatgcgatctttatcgaaagcgtgcatcggctggcccagttcgagcagcacatagttggtgacgtcaacaactgcatcgatagaacggatcccgcaacgacgcagtttttctttcatccacagtggagttggcgctttaacgttaatgccttttaccacacggccaagatagcgcgggcaggcatccggcgcttctactgcaatcggcagcgtgtcgtcgatggtcgcaccaaccggaacgatttccggttcaaccagcggcagctggttcaacacggcaacgtcgcgcgcaacaccaatgatacctaagcagtcggcacggtttggcgtcacgctaatttcgatggtgttgtcatcgagtttcaggtattcgcggatgtcggtgccaatcggcgcatccgcaggcagctcgataatgccgttatgatcgtcagaaattcccagctcagagaaggagcacagcatcccttcagacggttcgccacgcagtttcgcggctttaattttgaaatcacccggcagaacagcaccaatggtcgctaccgccacacgcaggccctgacggcagtttggcgcaccgcagacgatgtccagcaggcgatcgccgccgacattcacttttgtcacacgcagtttgtcagcgttcggatgctgtgcacactcaaccacttcaccaacgaccacgccgtggaagctaccggcaaccggttctacaccatcaacttccaggcccgccatcgtgatttgatttgccagcgcgtcgctatcaatcgccgggttcacccattcgcgtaaccacagttcactgaatttcataatctattcctgccttatttaaactgtttgaggaaacgcagatcgttttcgaagaatgaacgcaggtcggtgacgccgtaacgcaacatggtcagacgctccatccccatcccgaaggcgaaaccagagtaaacttccgggtcgatgccaacgttacgcagcacgttcggatgcaccatcccgcagcccagtacttccagccatttaccgtttttccccatgacgtccacttctgcagaaggttcggtaaacgggaagtaggaaggacggaagcggatctgcaaatcttcctcaaagaagttacgcaggaagtcgtgcagcgtgcctttcaggttggtaaagctgatgttggtatcaacaatcagaccttccatctgatggaacatcggcgtgtgagtctggtcgtagtcgttacgataaacgcggccaggcgcgatgatacgaatcggtggctgctgggctttcatggtgcggatctgtacgccagaggtctgggtacgcagcaggcgggtagcgtcaaaccagaaagtgtcgtggtcagcgcgcgccgggtggtgaccaggaatgttcagagcatcgaagttatgataatcgtcttcgatttccggcccggttgccacggtaaagccaagctcaccgaagaaactttcgatacggtcgatggtacgggtcaccggatgcagcccgccgttttcaatgcgacgacccggcagggagacatcaatcgtttccgccgccagacgcgcattcagtgcagcgctttccagttccgctttacgcgcattcagcgcctgctgaacctgctctttcgcttcgttgataaccgcaccagctgccggacgctcttctggcggcagctcacgcagggtcgtcatctgaagggttaagtgcccttttttacccaaatattcgacgcgcacattatctaacgcggcaacatctgacgcctggctaatggccgccttcgcactggcaaccagttctgcgagatgtgacatgtttttcctcattgtgtcagtggtgacactggttcgttggacttagagcccatcccatcaggctattttacttgccattttggtcccgggcagtgctcgaaatcctcacgtacttaagtacgctccggtttctccgcgctggccgtgtccagactggctgcgacaattacgcctgatgagacaggctttttatttttcaaaacgcgcatacaaaaaaagcctccactgggaggctttcaggcgctgttttccgtttctcttctcacgcgctagcctcctggagtcaggtgctaaagtaaaaaaagaagcggaaaatagcagcattcattgcttgcgttaccttttggtactcttcaaaagacctttattgaaaaggctacggcgataaaagtcaatgttttgatggcgttgaaacgaaaagagggagactagctccctctttcaactggcttatgccagagctgctttcgctttttcaaccagagcggtgaacgctactttgtcgaatactgcgatatcagccaggatcttacggtcgatttcaacagaggcttttttcaggccattgatgaatttgctgtaagaaataccgttctgacgtgctgctgcgttgatacgcgcaatccacagttgacggaactgacgcttacgttgacgacggtcgcggtaagcatactgaccagctttgataacagcctggaaggcaacgcggtatacgcgagaacgcgcaccgtagtagcctttagcttgtttcaaaattttcttgtgacgtgcgcgtgcaataacaccacgttttacgcgagccatatgtgctctcctgtatctatattctaattaaaaagttaaaaacgttaacggcttatgcgtacggcaggcacgcgattaccaggcccagatcgcctttggaaaccatggctttcggacgcaggtgacgtttacgtttggtcgcttttttggtcagaatgtgacgcaggttagcgtgcttgtgcttaaaaccacctttaccggtttttttgaagcgcttagcagcaccgcgtacggtcttaatttttggcattttaataacttccacttcgcattgttaataaacgaaacaaaggcgaacaatgcctgtgaagcccaaaggctccacagacagtgctacttgaaggccttactgtttcttcttaggagcgagcaccatgatcatctggcggccttcgatcttcgttgggaaggattcgaccactgccagttcttgcaaatcgtctttcacgcgattaagcacttccataccgatttgctggtgcgccatctcacgaccgcggaaacgcagcgtgattttggctttatcaccctcttcgagaaagcgaatcaggctgcggagttttacctgatagtcgccttcatctgtaccaggacggaatttaatttccttaacctggataactttttgctttttcttctgttccttagaagacttgctcttttcatagaggaatttgccgtaatccattatacgacaaaccggcggctcggcgttagggctgatctcgactaagtctactccggcttcttctgctttctccagagcttctctcagactcacaataccaagctgctcgccttccagacctgttaagcgaacttcctgggcgcgaatttcgccattgatacggttagggcgcgccgtttgaactcgttttccgcctttaataccttattcctccaattgtttaagactgcggctgcgaatctcttgttgcagcttctcgatcacttcatttacgtccatgcttcccaggtctttaccacggcgggtgcgaacggcaactttgcctgattccacctctttatcaccacagaccagcatatatgggacgcgacgcaaagtgtgctcgcggattttaaagccaatcttctcatttctcaagtctgctttaacacgaatgcccgcatttgatagtttttgcgtcagttcgttaacgtattcagactgagaatcggtaatattcatgataacaacctgaactggcgcaagccaggtcgggaagaaaccagcaaattcttcggtcaggataccgatgaaacgttccatcgaccccagaattgcgcggtgaatcattaccggtactttacgttcattgtcttcgcctacataagaagcgctcagacgagaaggcaaagagaagtccagctgtactgtaccgcactgccatgcacgatcgaggcagtcatacagggtaaattcaattttcggaccgtagaaagcgccttcacccagttgatattcaaacgggatgttgttttcttccagcgcaaccgccaggtccgcctcagcacgatcccacatttcgtcgctgccaatacgtttttcaggacgagtggagagtttgacgacgatcttctcgaagccaaaagtgctgtacatatcatagactaaacggatacatccgttaacttcatcgcgaatttgttcttcagtacagaagatatgcgcgtcatcctgggtaaaaccacgcacgcgcatcaggccatgcagcgaacctgacggctcgttacggtggcagctaccaaactcggccatacgcagcggcagatcgcgataagacttcagcccctggttgaaaatttgtacgtgccccgggcagttcatcggcttaatgcagtattcacggttctcagaagacgtggtgaacattgcatctttgtagttgtcccagtgaccggttttttcccacaggacacggtccatcatgaacggacctttaacttcctgatactggtactctttcagtttagaacgaacaaacacttccagttcacggaagatggtccagccgtcgttgtgccagaataccatacccggcgcttcttcctgcatatggtacaggtcgagctgtttaccgattttacggtggtcgcgtttcgcggcttcttccaggcgttgcaggtaagcgttaagcgcttttttgtctgcccacgccgtaccgtaaatacgttgcaacattttgttattgctgtcgccacgccagtaagcccctgccgttttcattagtttgaaatgatggcagaaacgcatgttcggtacgtgcggaccgcggcacatatcgacatattcttcatggaagtacagacctggcttgtcatcatgggcgatgttttcgtcaagaatggagactttgtagctctccccacggttggcgaaagtttcacgcgcttcatgccagctgactttcttcttaatgacgtcgtagtttttctcagcaagctcatgcatccgcttctcgagtgcttcgacatcttcctgggttaacgtgcggtcaagatcaacgtcgtaataaaaaccgttgtcaataaccgggccgattgccattttggtatgcggccaaagttgtttaatcgcgtgccctaacaggtgcgcacaggagtgacgaatgatctccagaccttcttcgtctttggcagtaatgatcgacagttgtgcgtcgttttcaatcagatcgcaagcatcaaccagttcgccattaacgcgccctgcgatacaggctttcgccagacctggaccaatgtccagcgcaacatccatggggcttacagcgtggtcgtaatggcgttggctgccatcaggaagagttataacaggcattttatatccttatttgcagtggtgacccacacgaaagatcacatacaaagaaaaatttgtttattaacagttcattgcgaaaccatctagccaacaaatgctaaattggtccgcaatcaggtacacaaatgaaagacattaacctctcaccttccacccggttgaacgatgttaacactaaaaaaagggagattgtacctttccgtttcacattgattcgattcgcaattcgtttgtagtgagtacaccagcaaaacgcttaaagaaccactgataacatcacagagtgtctgaaaggtttactacgagcggatttacagcagcataaactgaatccagcaaagttcgttgcgtgatttggcggtagtatttaaacgatcatgagattaatgacgaagtagtcatatcgcaatgataaaagtgacacaattcttatagcaatttttcgtgcgcatttcgttctggcgataataatcaatcatcatcctcaaaatctccagacatatataaggcgaatagattatgagtaaaaacgatatcattatcagaactcattatgagtctcctcttagaatgcacatcgatagcgacatactaacgccttcatcagagcctattaatcaatttgcgcgccagctcatcaccctacttgatacctcttatttaagttcgatgctgtcatactgtgttactcaggaatttaccgcaagctgtcgaaaaaatatcacacaattgttataccactgccctttttatcattaactttgccacttcacccatccatgcagaaaatacactcattacattacactataaaaaagaaatcatttccttattcctggaaaccacgccgattaaagctaaccatttgcgaagcatactggattatattgaacaggaacagttaactgccgaaaaacgtaaccattgcatgaaactgtccaaaaaaattcatagagaaaaaaccatacagccaacagtaaatctcaatgatagtgcatttttttgcaatctccttctgacactattttttgtcgccatctgtcattaaaatacgcccttgattcattgagaaatggaaaaggcaaagtcaacctgattaaacattactcctctgttgaatccatacagcagcatgtttccttagtccgggacgcggaattcagagcattacttcgccatcctcttgcaaggagtcgcgttatcgcgagtcaggattttggctttgctttagatattttcttctgtcgaatgatggcaaacaatgtcagtcatatgtccgcgattttatatatagacaatcatactttgtcagtaagtaaagatgtcgtgttatcttatatatcaacgttgggtacttttgaaaaaatattcttttagccaacgtcagttatttacactgttggccgctaaaaatcatgacaacatgtcagctgttcatatagccattcatcataatcatcataaaactgtagaaacatattatgctgctataaatgtaatcagccaaagcctgagttttagtgctgatgaactaaagacgtatttataacccgctatttatgatatttgtatatcgatacataatttttttcataaaatgcagaaacagtgaccaggtgtacaacgccacccgacgactgtaataacaaaaaatcccttgatgcctgtcccttttgttacactccgttatcacgcacaagagatatgcaggacactggtatgccgactaaacgctttgataaaaaacactggaagatggtggtggtgctactggcaatctgtggcgctatgttgttggtacgttgggcagcaatgatttggggctgagcagtgacaaacgaaaacagccagaccgcataacacggtccggcagataattttacatgctgtaacccaacgataaggttgtccgacgatcggtatgttccggtgcagactctggaggttcagagttccatgtaacgttgtaagccaccttcagtccaaaatgttcattaatagcaacatttaatgcgctttcggagttcagcgttgtgtcttccgcgccaaagaccgaaacaccctgcgtaaatttagcgttgtcagtcaactgccatgcataagccccggaggcatagcccagcggctgggtttcactggcattgtcggtatatttgtcgtaacgcacaccagggccgaattcaaagcggaaactgtgtaccgggccattcaaaaactggcgaccataacccgcggtcaacacatcgcgctctcgatagccgttataacggtctgtcagccagcttgcctgaccaaataaatagtcataatcagttaaattaaaacggctacgcccgcccgccgcatatttttctgaagaacgctcatcattagaagaagtattactggcgttcccccacagcgaccaggcagtggtttgtccataccaggtcatagtggtgtcagccgtaagtgaggagcttttcgtattgcctgattgtgcaagatatcctgcgttcagattaccttcgaaaggttttttagcgctggcaggatcgtccatgacagtaaaaacggaatcatcggcagctgcattcagtgacgcaaacatgccccccgccaacataacgatggcaggaactgtcttcaaaagcttcatttatcaagagtccgtacaacaaaaaaagagaccatcgcggtcccggaaactttcttaaggatcaaagattagcgtccctggaaaggtaacgaattataaaaaggcgcgaataacttagcaatgtattcttatttcattttttgaataagcatgtggcgaaaacagatttttatttatatatatttatctgcaaaattttaaataaagctccaataaatcatattgttaatttcttcactttccgctgattcggtgccagactgaaatcagcctataggaggaaatgatggtacgtatctatacgttgacacttgcgccctctcttgatagcgcaacaattaccccgcaaatttatcccgaaggaaaactgcgctgtaccgcaccggtgttcgaacccggtggcggcggcatcaacgtcgcccgcgccattgcccatcttggaggcactgccacagcgatcttcccggcgggtggcgcgaccggcgaacatctggtttcactgttggcgcatgaaaatgtccccgtcgctactgtagaagccaaagactggacccggcagaatttacacgtacatgtggaagcaagcggtgagcagtatcgttttgttatgccaggcgcggcattaaatgaagatgagtttcgccagctcgaagagcaagttctggaaattgaatccggggccatcctggtcataagcggaagcctgccgccaggtgtgaagctggaaaaattaacccaactgatttccgctgcgcaaaaacaagggatccgctgcatcgtcgacagttctggcgaagcgttaagtgcagcactggcgattggtaacatcgagttggttaagcctaaccaaaaagaactcagtgcgctggtaaatcgcgaactcacccagccagacgatgtccgcaaagccgcgcaggaaatcgttaatagcggcaaggccaaacgggttgtcgtttccctgggtccacaaggggcgctgggcgttgatagtgaaaactgcattcaggtggtgccaccaccggtgaaaagccagagtaccgttggcgctggtgacagcatggtcggcgcgatgacacttaaactggcagaaaatgcctctcttgaagagatggtccgttttggcgtagctgcggggagtgcagccacactcaaccagggaacacgcctgtgctcccatgacgatacgcaaaaaatttacgcgtacctttcccgctaacaaaaacattcccccagcattgggggaatcaccaccaacctgtcggcaacgcgtttctccgactatgctcaaaagtcatgtgataacaaaggggtgaactatggccagtggcgatcttgtccgttatgtaataaccgtcatgttgcatgaggatacattgactgaaattaacgagttgaataattacctgactcgcgacggttttttgctcaccatgacggatgatgatggcaatatccatgagctggggactaacacttttggacttatcagtacccaaagtgaagaagaaattagagaactggtttcggggcttacccacagtgcaaccggcaaagatcctgaaatcaccatcacgacctgggaggaatggaatagcaacagaaaataaatggtttttgggcaataatcagtctgtggtgtgcgttagctcgtgtttttacaccgcattcttgcgctaaccttatgatctggcagacaacatgggagagacatcatgtggcaggcaatcagtcgtcttttgagcgagcagttaggtgaaggcgaaatcgaactgcgtaatgaactgcctggcggagaagtccatgccgcatggcatttgcgctatgcaggacgtgactttttcgtcaaatgtgatgaaagggaactgcttcccggttttaccgccgaagccgaccaactggagttactgtcgcgtagtaaaaccgtcaccgtgcctaaggtttgggcagttggcgctgaccgtgactacagttttctggtgatggattatctcccacctcgcccgctggatgcgcatagtgcatttattcttggtcagcaaattgcgcgtttacatcaatggagcgaccaaccacaatttggcctcgatttcgataacgcgctctccacaactccacagcccaacacctggcaacgtcgctggtcaactttttttgctgaacaacggattggctggcagctggaactggcggcagaaaaagggatcgctttcggcaatatcgatgccatcgtcgagcatattcagcagcgtctcgcctcgcatcaaccgcagccttctctgttgcacggcgatttatggtccggcaactgtgcgctgggtccggatggcccgtacattttcgacccggcctgttactggggtgaccgagagtgcgacctggcgatgttaccgctgcatactgaacagccgccacaaatctatgacggctatcagtcagtatccccgctacctgccgatttccttgaacgtcaaccggtttaccaactctacacgctgttaaatcgtgcaaggttatttggcggtcagcatttggttattgctcagcagtcactggatagattattagcagcatgatatgggttgaggataatggccgctccgtgcggccttttgattaaataaacccaagcagagaaaagaacacataacctgcagcaatacaaataagcggcaggatatacagcgagaaaaactgcaggaaaatagtatggtgcggaacaacaatacgtgactcaatttgttcacgcgttagcccctcttcccctttggctttttccagaatgagttgatcttcaacaccttcccgcaagaagcgcgcctggcgactcatccgggctccggaatcctgcaacgccagtccgacaaaaatcaggatgaaaatcacccagaacataacgttcacgccaccattaaaatttggcgtcggagagttgtaccagaacagattcaaaaaaggcgtattcgcctgcatcatatcgatcatgacatgagtaaagtcgagcatgaccgcattaatgccttcctggttttcctgccgggtattcataaatttcagcaaagaaatcaatgtagagatcaatgcaggtataaaaatcacccaacccaaaatccttttcaaaacagcaatgcgtccagcttgttgatacgtcatgagttctccttgattaagacgcgtcgtttcacttagtttacctgtagatatctgttttcgcccattctttaaaggcgatatgataggcgcttaatcataagcacggcttaataccttacatataatgctctaaaggagaggttgtaatgtcaaccccgcgtcagattcttgctgcaatttttgatatggatggattacttatcgactcagaacctttatgggatcgagccgaactggatgtgatggcaagcctgggggtggatatctcccgtcgtaacgagctgccggacaccttaggtttacgcatcgatatggtggtcgatctttggtacgcccggcaaccctggaatgggccaagccgtcaggaagtagtagaacaagttattgcccgtgctatttcactggttgaagagacacgtccattattgccaggtgtgcgtgaagccgttgcgttatgcaaagaacaaggtttattggtggggctggcctccgcgtcaccgctgcatatgctggaaaaagtattgaccatgtttgatttacgcgacagtttcgatgccctcgcctcggctgaaaaattgccttacagcaagccgcatccgcaagtatatctcgactgcgcagcaaaactgggggttgaccctctgacctgcgtggcactggaagattcggtaaatggcatgatcgcctctaaagcagcccgcatgcgttccatcgtcgttcctgcgccagaagcgcaaaatgatccacgttttgtattagcaaacgtcaaactctcatcgctgacagaactcaccgcaaaagaccttctcggttaatgaccagggggcagtgatcacactgcccctggttctttatctgaatttgcattcaactgacggattaatcgccaatttaagagaaagagttacaccgtcaccacttccgtgcactgtataaaaaccctatactgtacgtatcgacagtttagtgagttttatcatgacggcggaaggtcaccttctcttttctattgcttgtgcggtatttgccaaaaatgccgagctgacgcccgtgctggcacagggtgactggtggcatattgtcccttccgcaatcctgacgtgtttgttaccggacatcgatcacccaaagtcgtttcttgggcaacgattaaagtggatatcaaaaccgatcgcccgcgcttttgggcatcgtggttttacccacagtctgctggcggtatttgcgctgctggcaaccttttaccttaaagttcctgaaagctggttcattccggctgatgcgttgcagggtatggtgctgggttatttgagccacatacttgccgatatgctgacacccgccggtgttcccctgctctggccatgccgctggcgtttccgcttgcctatcctggtttcccaaaagggcaaccaactggaacgttttatctgcatggcattatttgtctggtcggtatggatgccccattcattacccgaaaacagcgctgttcgttggtcatcgcaaatgatcaataccttacagatccagtttcatcggcttattaagcatcaggttgaatactaaaaaggcaaaaatcgcctttctggaataagcaattccatttgaatataagagccagctcacagttctgttaatcttgcgccaacactatgactgttacgcagtgatagaaataataagatcaggagaacggggatgaactttccattaattgcgaacatcgtggtgttcgttgtactgctgtttgcgctggctcaaacccgccacaaacagtggagtctggcgaaaaaagtgctggtgggtcttgtgatgggtgtggtttttggccttgccctgcataccatttatggttctgacagccaggtacttaaagattctgtacagtggtttaacattgttggtaacggctatgttcaactgctgcaaatgatcgttatgccgctagtcttcgcctctattctgagcgcggttgcccgtctgcataacgcatctcagttaggcaaaatcagttttctgaccatcggtacgcttttgtttaccacgctgattgcagcgctggtcggtgtgctggtcaccaacctgtttggtttgacggctgaaggtctggttcagggtggtgcagaaactgcacgtctgaacgccatcgaaagtaactatgttggtaaagtctctgacctgagcgttccgcagctggtcttgtcctttatcccgaaaaacccgtttgccgatctgaccggagccaatccgacgtcaattatcagcgtggtaatttttgccgcattcctcggcgtagctgcgctgaaactgctgaaggatgatgcgccgaaaggtgaacgcgtcttaaccgctatcgataccctgcaaagctgggtgatgaaactggttcgcctggtcatgcagttgaccccttacggtgttctggcgctgatgaccaaagtggttgcaggttctaacctgcaagacatcatcaaactgggaagtttcgttgttgcgtcctacctcggtctgctgattatgtttgcagtgcatggccttctgctgggcattaatggcgtgagcccgctgaagtacttccgtaaggtatggccagtactgacgtttgcctttaccagccgttccagtgctgcgtctatcccactgaatgtggaagcacaaacgcgtcgtctgggtgttcctgaatccatcgccagtttcgccgcctctttcggtgcgaccattggtcagaacggttgtgccggtttgtatccggcaatgctggcggtgatggttgcgcctacggtgggcattaacccactggacccgatgtggattgcgacgctggtcggtattgtcaccgttagttccgcaggcgttgccggtgtcggtggtggtgcaactttcgccgcactgattgtgctgcctgcgatgggcctgccggtaacgctggtggcattgttaatctccgttgaaccgcttatcgacatgggtcgtacggcgctaaacgttagtggctcgatgaccgctggcacgctgaccagccagtggctgaagcaaaccgataaagccattctggatagcgaagacgacgccgaactggcacaccgttaatcctgatttgttacgttaaacgcctgtcatcccgacaggtgtttttttattcttcgacctcattttcctgacgaatctgatttgcccaacgctgggcggattcaggcacagtaaacgccggtgagcgcagaaatgactcccccatcagtacaaacgcaacatatttgccacgcagcatccagacatcacgaaacgaatccatctttatcgcatgttctggcggcgcgggttccgtgcgtgggacatagctaataatctggcggttttgctgacggagcggtttcttcattactggcttcactaaacgcatattaaaaatcagaaaaactgtagtttagccgatttagcccctgtacgtcccgctttgcgtgtatttcataacaccgtttccagaatagtttccgaagcgggatctggctggtggtctatagttagagggttttttgaccaaaacagcggccctttcagtaataatttaaggagacgagttcaatgtcgcaacataacgaaaagaacccacatcagcaccagtcaccactacacgattccagcgaagcgaaaccggggatggactcactggcacctgaagacggatctcatcgtccagcggctgaaccaacaccgcctggtgcacaacctaccgccccagggagcctgaaagcccctgatacgcgtaacgaaaaacttaattctctggaagacgtacgcaaaggcagtgaaaattatgcgctgaccactaatcagggcgtgcgcatcgccgacgatcaaaactcactgcgtgccggtagccgtggtccaactctgctggaagattttattctgcgcgagaaaatcactcactttgaccatgagcgcatcccggaacgtattgttcatgcacgcggatcagcagctcacggttatttccagccatataaaagcttaagcgatatcaccaaagcggatttcctctcagatacgaacaaaatcaccccagtatttgttaggttctctaccgttcagggcggcgctggctctgccgataccgtacgtgatatccgtggctttgccaccaagttctatactgaagagggtatttttgacctcgttggcaataacacgccaatcttctttatccaggatgcgcataaattccccgattttgttcatgcggtaaaaccagaaccgcactgggcaattccacaagggcaaagcgcccacgatactttctgggattatgtttctctgcaacctgaaactctgcacaacgtgatgtgggcaatgtcggatcgcggtatcccgcgcagttaccgcactatggaaggcttcggtattcataccttccgcctgattaatgccgaagggaaggcaacgttcgtacgtttccactggaaaccactggcaggtaaagcctcactcgtttgggatgaagcacaaaaactaaccggacgtgacccggacttccaccgccgcgagttgtgggaagcgattgaagcaggcgattttcctgaatacgaactgggcttccagttgattcctgaagaagacgaattcaagttcgacttcgatcttctcgatccaacaaaacttatcccggaagaattggtgcctgttcagcgtgtcggcaaaatggtgctcaatcgtaatccggataacttctttgctgaaaacgaacaggtggctttccatccagggcatattgtccccggtctggatttcaccaacgacccgttattgcaggggcgtttgttctcttataccgatacacaaatcagtcgtcttggtgggccgaatttccatgaaattccgattaaccgcccgacctgcccttaccataatttccagcgtgacggcatgcatcgtatggggatcgacactaaccctgcgaattacgaaccgaactcgatcaacgataactggccgcgcgaaacaccgccggggccgaaacgcggcggttttgaatcataccaggaacgcgtggaagggaataaagttcgcgagcgcagtccatcgtttggcgaatattattcccatccgcgtctgttctggctaagtcagacgccattcgagcagcaccatattgtcgatggtttcagttttgagttaagcaaagtagttcgtccgtatattcgtgagcgcgttgttgaccagctggcgcatattgatctcactctggcccaggcggtggcgaaaaatctcggtatcgaactgactgacgaccagttgaatatcaccccgcctccggacgtcaacggtctgaaaaaggatccatccttaagtctgtacgccattcctgacggtgatgtgaaaggtcgcgtggtagcaattttgcttaatgatgaagtgagatcggcagaccttctggccattctcaaggcactgaaggccaaaggcgttcatgccaaactgctctactcccgaatgggggaagtgactgcggatgacggtacggtgttgcctatagctgctacctttgccggtgcgccttcgctgacggtcgatgcagtcattgtcccttgcggcaatattgcggatatcgctaacaacggcgatgccaactactatctgatggaagcctacaaacaccttaaaccgattgcgctggcaggagacgcgcgcaagtttaaagcaacaatcaaggtcgctgaccagggtgaagaagggattgcggaagctgacagcgccgatggtagttttatggatgaactgttaacgctgatgacagcacaccgcgtgtggtcacgcattcctaagattgacaaaatcccggcgtaaatatggataaggtcacgccccctggggagtgaccttaccaccttacttacacatcatgataactacccaaccgataaccacgctcagcaatcgcatatttcaacgacgctgaagtcagcacatccagttccgttaaccgagggaagcaataagcactctggcgaatcgtattatcgacaaacgccggatggcacatgacttccaacgaacgttccccgcgatggctggaatcatcaagcacttgcaggaacaatgcctcgctaatctcttcaccataaaacgcgctactgaatccctgcgaactgcgcagattagccggtaaatcaccatcgttagatagcggttgacggtcgatgcgcaacgcaatcccctcttcagccgcaaactttgccacaatcgggaaaatctgcgggaacatatgcacatgatgatggctatcaagatgcgtaggtttgcgtccaaatagctcaatgaaacgcaaatactgactggcgagctcctgagtaatttcttccagcggtaaagcatcttcttctgccaactgccagatccattttcccagcacaccatcgcgggttaaccccggcatagctgtcagaggcttgcccatagtaaggacaaagtgcatccctatggccagactcggttcatcacggctcaactgcaccgcatggtcaatagcctgcccattcaccagcgccgtcgtcgacgtgacaatcccattgcgacaggcctcgataatgccgtagttctgacctttgcttaagccaaaatcatcggcattaacaatcagtaagcgttccataatcagcctcggttaatgtgcttttttaagctctgcgatgcagtcggcaaaatttggcagccatttctcgtgcgccagaatcatctcgcgtgccagcagctcagcatcgcgatcggaatgcaccaacggactaaggtttagcgccagtaagacatcgttaaattctccactaagtgcggcgttgctggcagcaatctcgaagcctttgatggtgtgaatcagccccatcactttatcatcgaaatgcgtaatgcgcggatgtggcgtcgcgccatcgcgccccagcgtacaggtcatttctaccgcccagtctgccggaatattatcaatatgcccatgatgcgggatattaacgtaatgttctgcttgcttgtcgttatagatagcgttgatcacttcgcacgcagcatcagaataataagccccaccgcgctgttccagttctttcggcttaacgttcaactccgggtttttatatagctcaaaaagttgtttctcgactttctgtactacctgcgctcgtgcgccgcctttgtagtattcgcccatttcaatagccagcatctctttttgcttgaagtaataaagcaaataagaacacggcaacagattcatagaacgaattaagccttcgctaaatggcagatcgaaaatatttttaacgccagatgcttttaactgcccggatgccacaccatcaagcaattcggcaaagcgtgatttgccatttaccagcacatccttaatgaacaccatatggttgaggccgaacagatcgatagataaatcatcgctgtctttcagcatcagaacatcgcgaataaacatcttcatgccgatcggaatattacacacgccgataaagcgtttaaatccggtatgacgataaacggcttcagtgaccattcccgccgggttagtgaagttaatcacccatgcattcggacatagttcttcgacatcttttacgatgtcaaaaatcaccggaatggtacgcagacctttaaacagaccgcccgcgccgttagtttcctgaccaagataaccatgacttaatggaatacgttcatccagttcccgcgccggtaattggccaacgcgcagttgggtagtaacgaaatcagcatctttcaatgcttcgcggcgatccagcgttttataaagcttcatcgggacgccagcgttatcaatcatccgttggcagagatcaaaaataatatccagtttcgctttaccaccttcgacatccaccagccataattcgctgaccggcaattcgtgataacgcttaataaatccttccagtaactccggggtatagctgctcccgccaccaatagtgacgacttttaatttctggctcataatttctcccttcagtacagaatactgatatctggcatatctgcccccggacataaataatccagcaacaggacagatatgtgaattgtcaggtataacgacttactgattaaattcagtcaatttcttacgatagctcttaggcgtaaaggatgttaatttcttaaacgttttaataaacaagctcgggctactataaccggcctcaaacgcaatatccgtcactgaatagttggtcatttccagttgttttttggcaaaattaatacggatttcattaataatctgcattggcgttttaccatagtatcgttgagtcgctcgcgtcaaatattcctgtgatttggctgacaacgtcaccatattctccagcgccgattcactaaactgctctttatcatgcatcttttctaccgtacttttcagccactgcggtatatcatcaatcacctgttcttcgcggtaatgacgtaaacggttaatgacataaaaagtaaccatctcaacaaactcttccagccctgtttcgcggaaattcaatgaagaaatcactgtttccacataggtgagaaaagcgttattggtccggtatacctgcgaagctacaaagcaataaggcaacaacggcaggtaatgctgctcaaaaaagcgtttactgatcccaacgttcaatatacgcgtggcaccaaattcataaaaactttgatggtgcgaacctaacggaataaaaacaaaatcgccccgttccagtaacacgcgcttaccgttaatctcctggaaataacgcccggttaataccagagtaaattcataatagtcgtgctgatgcagtccgctgatactctcagttttattgtagataaacacatggaagtttttgccattaaacaactgctgttctcgggcagtggcaatttccggcgcgttaatcactggctgcatcatcgactccttatgccttcagtttttcatgaagctcaattaattcagtaatcagttcacgcgcaagcatggacgtcattaaatgatcctgagcgtggaccagcaccagactcactttcatcttaccttcgccagcatcgccttcaatcagtttcgtctgtaccagatgcgcttcattcaatgccatccgtgactgatccatcatcgcttttgctgcggcaaaatcgccctgcttcgcctgtttcagtgccgcatacgccaggctacgcgcttgtccggagttgatgataagccccatcaccacttcttccagctcttcagcttccgtttgcgtatcgggaatattatcgagatccatcatacatcgttcctctctattcttaccggcacgattacccgtaccggcatcaattaaaatttcagggcgttggcgatatcttcttcgctctcttctttatcaatcgcgttttgtgctttgttagcgaccacaacaaagggcagataaattaacgttgcgataccaagattgaagagtgcgaccagcaatgcggcgacgctaccgttggtgttaaagaaggctcccagaccggttggcatggtccacggtgcaatattggtcaccggtggaataatgcccatgtagtacgctgccagggtgattgccgccagaatcggttgtaccagtacaaacgggataaacatcaccgggttcatgataattggcagaccaaacagaatcggttcgttaatctggaagatgccggacggcagcgccagttttgccacctgacgataatcagcacggcgagaagcgataaagatagccaggatcaggcctaaagtcgcaccactgccaccaaggaaaataaaggagtccagcatcggtttggcccagatatggaaggtcttaccggctgccagcgccgcttcgacggaaccatattgctgataggtcgcgatattttccagcgcccacggcgtcataatgccgttgtccagtgcggtcagcgccagcgcgccatgaataccgaagaaccagagcagtggaacaaagatcacataggcccagcctaccacgctacccaacgatgccagtggggttgagatggtatccataatgatctgatggaagtttgtgccccaggtattcaacgcccaggcaataatccccatcacggaaagaataataaaacctggaattaatgctgagaaagagcgcgaaaccgatgtcggaacgctatcaggtaacttaatgacccagttacgatgaacaataaaggtaaacatttctgccaccaccaggccaataataatcccggagatgatattcgccccacctaaccagtttgcgccaaccgcataggcctcaccgacactatatggggtgacggtcataaatgctgcaacggataacaacccggccgccagcgcatcgactttacgctcttctgccagcgccatgccaataaagaacggtgccattaaagacattatccctaatgttccgttatatacgttgccgccaatacctttcagaccattaagtgtttcaatggttgaggcatccaggcgaatacctaaggaataaaaaaacgacccctccccaaagcttagaaaaacgttgttaattaatacaaacatggcccccgcaagggttaacggcattaagcgaataaagccatttttgattgcattaacgtgtggctgctttcctattttaactgcaaaagggaggagtaccttttcaagcgatgcaataacattactcatagaaaaataccctttaaaaccgcaatttaaatattgcggtattgatttatgaaataactctttgacgggaaaatttaaaataaattaatttgctgcggcttttttaatcgctgcaaccgcagccttaagcacgcctaaaccatcgactttgccataaagcagcgagtcaattacttcaaccggtttgttgggtaacaaacgctggatttcgggcaacatataagcaatctgcggccctaataacacgacatcggcattctgacctttttcaccagccagtgtttccggaaatgcttcaataatgaccggaacttcatatttttctgcctgtgcgcgcatttttgataccagtaaagaggtagacatgcccgcagaacaaaacagataaatgtgtttcttttccataaaactgccctcatcgacgattatctgtcagccagacactccgcaagccttaacctgcttccatgctctgggtaacttgcgaaaccaacatgactttttttgtggctgaaaggagtatacggtataggcctgagcaatagtatttctttgaccttagaaattgtctctccttgacctgtggttatgaccctcttcacatttcgggcaaataattcgcgaagataattaagaacacaggccaaaaaaaaaccggcgcaatggccggtttccgttgttactcaagctttcaggcgaagtgattacttcgtagcctgtggatcagtgtcgtattcagcacaggtctgataaccggagttgatgacatgtccggtatcatctaacgcgacaaagtaggtttctgctttaccatcacgttgacccaggatgtaggtctggcaagtaccacgagcatggatcatgctcacttcagacgaaggtttacccgcaatttgtgcaacctgcgcccggctcatgccttttttgacgtctttcaccacaggctgtacaaactggtctttggtacgatcataagccgtacaacccgccagcatggttaataccgccgctgcactcagaattcctgccatattcttgttcatattccgtcctcttgtttatcagcgtgttagataagcctggaatacattgggcgctttttcaagcccgtgaacgaaacggctccgctttcagaggattcctgtatgacgttttaaccaccattcagcccgctgtcgcttgtcgtttcagtagcaacgggttagctttaaggacgttttgtcttttctgtctggaggggttcaatgacattgcaacaacaaataataaaggcgctgggcgcaaaaccgcagattaatgctgaagaggaaattcgtcgtagtatcgattttctgaaaagctacctgcaaacttatccgttcattaaatcactggtgctcgggatcagcggcggtcaggactccacgcttgccggtaagctgtgccagatggcgattaatgagctgcgccaggaaaccggcaacgaatcactgcaatttattgccgtacgcctgccctatggtgtccaggccgacgaacaagattgccaggatgccatcgcctttattcaaccggatcgcgtattaaccgttaatatcaagggcgcggtactcgccagcgagcaggcattgcgggaagcaggcattgaactgagcgattttgtccgtggcaatgaaaaagcgcgtgagcggatgaaagcacaatatagcattgcgggtatgaccagcggtgtcgtggtgggcaccgatcatgctgcagaagctattaccggattcttcactaaatatggtgacggcggtacggacattaatccgctgtatcgtctcaacaaacgtcagggtaaacagttactggcggcattaggttgcccggaacacctttataagaaagcgccaacggccgatcttgaagatgatcgcccttctctgccggatgaagtggcactcggcgtgacctatgacaatatcgacgactatctggaagggaaaaacgtacctgaacaggtcgccagaacaatagagaactggtatctgaaaaccgaacataaacgccgtccgccaattaccgttttcgatgatttctggaaaaagtaataatttgcacatattggtttgtgtgaaaaagagtactttgttcacgccggatgcggcgtgaacgccttactcgacctacaaaactatgcaaattcaatacattgcaggagtcgaataggcctgacaggcgtagcacgtcaaacggtgtaacctttgtcatcgacccgcctcttttttaatcgctctccgcctgttacactggatagataaccagcattcggagtcaacagtggtacggcgtttaacttctccgcggctcgaatttgaagctgcggcaatttatgaatatcccgaacatttacgttcattccttaatgacttacccacccgaccaggggtgtatctgtttcatggcgaaagtgacaccatgccgctctatatcggcaaaagcattaacatccgcagccgcgtcctttctcatttacgtaccccggatgaagccgccatgctacggcaatcccgacgcatcagctggatatgtaccgccggtgaaatcggcgctctgctccttgaagcgcgattaatcaaagaacaacagccactgtttaataaacgcttgcggcgcaatcgccagctctgtgccctgcaattaaatgaaaagcgcgtcgatgtggtgtatgccaaagaggtggatttttcacgagcccccaacctgtttggcctgtttgccaataggcgcgcagctttgcaagcattgcagaccatcgctgatgaacaaaaactttgttatggcctgttgggactggagccgttaagtcgcggtcgtgcatgttttcgttcagcgctaaaacgttgcgccggagcatgctgcggtaaagagagccatgacgatcatgcgctacgtttgcgccagtctctggaacgtttacgagtcgtttgttggccgtggaaaggtgcggtagcgctgaaagaacagcacccggaaatgactcaatatcatattattcaaaactggctgtggctgggggcggttaattcgctgaaagaagcgacaacgttaattcgggcacccgccgggtttgatcacgacggttataaaattctttgtaagccgctgctttccggtaactatgaaattactgaacttgatccggtgaatgaccagcaagccagttgatttcactgaacaacagtttaccttgcggttgcaaaagccgcagggtgtgcctgccatcgaaccagcacgcgccctggtcggtagtgagcagtttgtcgcccaattgccacgccccgtttattacaaacaccaccccgccgcgtgaaccaaaggtagtaaacgtacgttcggcaattctgactttcgccttacagacatccaggcgtgtcatgatgttgaaatccatcgacatctgccctgccgtcagtttcgcttttaccaccaggtccgctgcaaaggaaaaaggttgtaacggttttaaggtatggttaaagcggtctgcgctttcaaggaacatctcgccgccttccagcaacgtcactatcctttccataccgggaaacaaagaaaactccccattcgccgcgatggatgtaatgctggcacgccagtaaaaatcacgttttgccggtgggaaagtgcaaatttcgcgcgtttcaccggcagcgtttcgccacagattcaccgacattttacgcatatcaaagtattccatacccgctcccggcccgttcttttcattgttatcgttcaggtaaccgtggatggttatcggcaactcgggtgatttacgttagtggcgatcaggctttttttgcatctgtttgagaagagaaaagaaaaccgccgatcctgtccaccgcattactgcaaggtaatggacaagaccggcggtcttacgttttttggctgaaagattattcagcagttgcaggcattttaccttttgccgctggacgttctgtcagacgcttctcaaaattagcattaaattgctttttctgttccggcgtcaggatgttgtaaatcttgttctgggtttccatgtgcgccagcatgttagctttgcgctgttcttccatttttgcgatctgcgcttcagcttttgctttatcgaaggtatcgctggcaatgatgtcatgcattgcgcggcgttcttccagcggcggacgtttcatctggtcacgctggcctttcatgatttcgcggatctgctgtttctgcgcgtcggtcaggttcaggtctttgaacatcatgtcctcatgcggaccgaacttgcctttatggtgcatcatcggcttcgcgtcagccggtgctgcggtagtggtgtctgcggcatgggccaggttagccgcgccaagagccagggtagaggcaacaaacagtgcagttaatttacgcatattctatatccttcctttcagttatttattacggctttcttaagtagcgtgccgtgttgacgagattaactttactgactttagcgtcaattaatcagagcaacggtaaaacaatgaaagtgtaaaaaacacttttgcgccaattatggagaaaaaaagaaaatttgatggagagtgatgagagaatattacaacacgatgattttgcagagattatgaagaactataccggatgactggtgataaataaagcaaataaccaggattaatctgtattaatttataagaaagcaacttaatacccgcagaatgatttctgcgggtaagtattagcttattttttcgagcattaatcccgcacgtaatcccaacgctaccaacggattagggaataacacatactctacatcatgggttacggtaaaacgttcctccccgtcctgcgccagcaatgttcctttctcaaacggcataaaattcagcgtgtcatttgccatatgcatttcgaaggacggcgagtggcgagtaatttgcgaaaccacccgataacggagcggcggtgttctcacgataccgacactctcaccagatagcagcgcagcaattgcgctggcagttactgcaaactggcgaagatcgttttgcccaaagggcaacgctttgccaagttccagcgtacaggccagcgcgccaaaatgtctggcgctgaaatgggtaaacgtaccaccaggctcctgatggaacaccagcgcctccagccccgccgcacccagccacgtcagaaatttctcgtcccagggaatgtcgcgttgcggtaatacaccgaactgcggatgcaaggagccacgaattgcggtatgtagatcaaggtgccagcgcacagattctttgccctggtcataaaaatcttccaggcactgctccagttcgcgcgcccgacaggtttccccgctttcagcaaacagttgccaacgaccgccaaacattcgattcatatcgctatggcaataacgtttcccttgcttcagcgcaggaggattcccgaggatcaccagtaaccgccaacgtaacgggatctcaccgtgagatatcgcgccaagcaacgcgtccagcatttccacaggtgccgtctcattaccgtggatccccgctgaaatcaccagcacgccttgcggtggcgttaatggcgtcagttccagcacaccatcgcccagccagcgccagcgaacgccgttgatttctcgctcggtgatgaccggttttttacccgttaaggttagagcaagaaaattatccattgccccctccctcgcgctggaatggataaaccgaaccaagatccaataattgagtcagtgtatccagcgcttcccttccttcgcgcagcaattgtggatcggcaagatccgccgcagtaagacgatcgcggtagtaacgatccacccagtcattgagcgcattaaacagcgtatcgttcatcatcactgccggattcaccgcccggcgttcttcttctgtcaacaccacgcgcaaccgcaggcacgccgggccaccgccattcgccatgctttcacgtaaatcaaagacttttagttcgctaatcgggttgtcagcagcaagcaattcgttgagataacgccatactccggcgtgttcccgacactcctgcggcagcaccaacaccatggaaccatcatcgcggctcagcagttggctgttaaacagatacgtagataccgcatccgacacggaaacctgagtcgccggaacttctatcgccataaaaccattgacccgcgcacgcaggtttgccagtaactgtgactggcgagcgaacgcctgttgatggcaaaacagcacctggcggttactcacggcaatcacatcattatgaaaaacgccctggtcgataacgtcggggttttgctgggcgaaaatcacctgctgtggattcacctgattcagccttgccaccgcctcgctggcttcgcgagtctgccgcgccggatagcgggacggtcgggtatcattgccctcctctcgcccgtaaacaaaaatctgcattcccggttcaccgtaatgaccgccgagacgattatgattcgcggctccttcgtcaccgagcaaagccacctgcggcaacgccgaatggacgctaaatttctcttcgtcgttaaaaatcgcttttaacagcgattcggtgacgggggcttccagcgaacggtgaaatttattgttcaggttagcaacagtgagatgcactttgccatccagcgtatcggcggatggcgcgatcgttgccgcattggctacccacattggcgaagcggaactgacgctggaaagccagtgcggtgcctggcgtgcaactttttccagtacctgctcatcgctaccactgaatcccaactgacgcagcaccggaataaacggacgctcgtgcggcgggatcacggcctgggggaatcccgcaccggcaagttttttcattttcagtaagccctgttttgccgccagtcgcgggttagacacctgaaaacggtgacgggtagaggcttcattaccaaacgacaggcccgcgtaatggtgcgtcagccctaccagcccgtcgaaattgacttcccaggcgttcatcgcaccacctcatcggaaaaatccagcccggggttaagcgttgcgggcaacgttaacgagtccgactccagacttgccatcggccaggcacaataatctgcggcataccaggcgctggggcgatgattgccggaagcgccaatgccgccgaatggcgcggtactggcagcaccggtaagcggtttgttccagttaacaatccccgcccgtgcccccagcaacagttgatcgaatttttcccgctcgggggaaaccagaccgcaagagaggccgaagcgagtgttattcgccattcgaatcgcttcatcgaaattgtcataacgccagacgcgcaataacggcccaaacacttcttcatccggcacgccagtaacgcctgtcatttcaatgatccccggcgtcagcaacgatgtccctgcttgtaataagcgcggcgcaagcagggtccgtccgcccatcgcctccagttcctgccaggcagtaaccacctgctgtgcggcctgctcagaaatcagcccaccaataaatggctgcggttcgtcatcccaagtgcccggcgttaaccgctggctgacggcaaccatgcgagcaagaaatgcatcgccctgcgttccacttttcagaaataaacggcgggcgcaggtgcagcgttgcccggcagtgacaaacgccgactgaatggtcagatggacagcggcatcgatatccgccacctcatcgataattagcgggttattaccgcccatctcaagggcgagaattttctccggctgaccggaaagctggcgatgcagctggtagccggtattggcgctgccggtaaacagcaagccatcgagatcctccagcgcactcagcgcctgacccgttgcacgcccgccctgcaccaggttcagcacgcccggcggcaagccagcctgctgccataaacgcattaccgcttcgccactccacggtgtcagttcgctgggtttaaagataatggtgttacctgccagcaatgccggaacgatatgtccgttcggcaaatgaccagggaaattatacggcccaaacaccgccagcacgccgtgcgggcgatgtcgcaggctcgccgcgccgtccggcatttcgctacgctgctcgccggtacgaacgtgatacgccttaattgatatcgcgattttattgatcatcgccgtcacttcggttgccgcttcccagcgcggcttgccggtttctctggcaataatcgcggttaattcggctttattgctttccagcaatccagcaaagcgttcaactcttacctgacgatcgccaaatgagagccgagcccagcgcggaaacgccgcacgggcagcccgacaagcctgcccgacctgagcggcatcggcatcattgccctgccataacacctcgcccgataccggattacgcttcacacgcaatgcgccctggcccgttacccagtcaccgttgatccataaagtcatgctgttttctcctctgcgcacaggcgcaccagacgaacgcgatcccctgcgtggcatttgagggcatccagttgtgcggcggttgaaatcaaacgctcggtcgctggatcggtacgcaccagcaccacgcggaaatggtgataattttcattggcgaccaggcaggccggaaaatcgccctgcgcaggctgcccttcggccacttccaccagccgacttttacggatggcgcgcacgcggtcgatatcacattcaagtgtcggcccgccgtcaaagatgtcgatatagttacggtagcgaaaaccttctttctccagcaccgcacgggcaggcgcggtttgcggatgtacctgaccgatgacgtcctgggcttcctgggataaaaagtgggtatagatcggatgtttcggcatcagttctgcaataaatgccttttgcccggtgccgcagagaaaatcagcgcggctaaaatccatcgaaaagaagcgtttaccgaggctttgccagaacggtgaatagccgtgttcgtcaatcaccccgcgcatttcggcgaccactttgtcattaaacttgtcgcgaaaagccgccataaacataaagcgcgatttcgacagcaaatagccgttgccctctttgcgccacttcgggtcgagaaacagcgtgcacagctcgctgctgccggtgtgatcgttactgagaaacagcgtcggcaatgcgttatagacattcagctctttcgaagcgtgaaccagcgtgccgacgcgatagttgtaccagggatcgttcagcccaaccgccacctcaatggcgcaaatccccgccacagtgcctgtctcactatcttccagtacaaacacataaccctgctcacttttgggcagttcgccttgccaggttttgattgccctttcaatacgcaccgaaagcgtggcttcattggcgggaagcgacgtcaggccgccgcccgttttgctggcaagctgcatcagcgccgagacatctgagcgctcaacgggacgaatgaccatcatgatgaacctcggctaacaaagtgttcgcaagcagctgcaaagcgatccagtccggtcgtcacctcttcttcgctgacattgagcgcaggcgcaaagcgcaccacgttgccacccgcaatcagcaccatcacgcctgctttcaccgcttcctgagagatctgtttcgcttgcccggcgtaatcggcattcagtacacagccaatcaaaagacctaagccgcgaacttcactgaacaaactgtagtggtgattaatggaatttagacgctcaacaaaccagtcgtgacgctgtttaaccccgttaagcatctctggcgtgttgatgagatccagcactttgcctgccaccgccgaggccagcggattgccgccataggtggtgccgtgagtgccaacggtcatcacgctggcgcactcttcggttgccaacaacgcaccaaccgggaaaccgccgcccagcgctttggcggtagttaacagatcaggcgtcacgccgtagtgcatacaggcatacagttccccggtgcgcccgacaccggtttgtacttcatcaaagatcagcaacgcattgtggcggtcacacaattcacgcagaccttgtaaaaatgcgttgctggctggcaccacaccgccttccccctggatgggttcgacaatcaccgcacaggtggcgtcgtcaatcagcgcactggcagagttaatatcgttatatgcagcatgacgaatatccggcggcagtggcgcaaaatcctgtgaataggctggctgcccacccgcactgacagtaaacagcgtgcgaccatgaaacgcatttttgaacgccacgatgccgctcttatggctgccgtagcggtcgtgagcgaatttacgcgccagttttagtgccgcttcgttggcttccgcaccggagttacaaaagaagacgcgatcggcaaacgtggcgtcgatcaattttttcgccagtcgcagtaccggctcgttggtgtaaccgttgccggtatgccagaacttactcgcctgttcgttcagcgcctcacgcagttccggatgcgcatggcccagcgcgttcaccgcaatgccacccgcgaagtcgatatactctttcccctgctgatcccacaagcgtgaaccttcgccacgtaccggtataaacggtgccggagcgtaaacaggtatcatccattcatcaaagttttcacgcgtaattggctgagacatagcgacctctacagtaaataattcgttatttatatgttaataatgagtaatgtttgcgctgtaaatgtagattgcagggttcgtgccagccagtgataaaagtgcataaacggcggaggctaactggaaatcaagcagttataaccacatcatatgcatttaaagtgcatataaagtgaatacgtttgcgatgtgggtgaataaaaagaataaaaaacgcaatgttatgcagaagtaaaatataattctggaattgtgatcattgacgaaatttactggaaattactgcgccattctgacgcaacgcgcaccaaaagcgggcattttttgcgccatcgttgacatcattaacaaccatcgatcaaatcacttaacaacaggcggtaagcaaagcgaaattctgctaccatccacgcactctttatctgaataaatggcagcgactatgaaatttgtctcttttaatatcaacggcctgcgcgccagacctcaccagcttgaagccatcgtcgaaaagcaccaaccggatgtgattggcctgcaggagacaaaagttcatgacgatatgtttccgctcgaagaggtggcgaagctcggctacaacgtgttttatcacgggcagaaaggccattatggcgtggcgctgctgaccaaagagacgccgattgccgtgcgtcgcggctttcctggtgacgacgaagaagcgcaacggcggattattatggcggaaatcccctcgccgctgggcaatgtcaccgtgatcaacggttacttcccgcagggtgaaagccgcgaccatccgataaaattctcggcaaaggcgcagttttatcagaatctgcaaaactacctggaaaccgaactcaagcgtgaaaatccggtgctgattatgggcgatatgaatatcagtcctggcgacctggatattggcattggcgaagagaaccgtaagcgctggctgcgtaccggaaaatgttctttccttccggaggaacgcgaatggatggagaggctgatgagctgggggttggtcgataccttccgccatgcgaatccgcaaacagcagatcgtttctcatggtttgattaccgctcaaaaggttttgacgataatcgcggtctgcgcatcgacctgctgctcgccagccaaccgctggcagaatgttgcgtagaaaccggcatcgactatgaaattcgcagcatggaaaaaccgtccgatcacgcccccgtctgggcgaccttccgccgctaatttagctgatctcctggctcaaactgggtcaggagaattaaccttgagaaaaatcaacaaactgtcagtaatgatttgttgcctgccgtcctttgttataccgtcactgcgtttttagttgtctgaccacttctctattatcaagtttgatataggaaactccacgatgaacgctgagcgtaaatttcttttagcctgtcttatttttgcgctggtcatttacgctatccacgctttcggtttattcgatctgctcaccgatttaccccacttacagacactcattcgccagagcggattgttcggctatagcctctatattctgttattcatcattgccaccctctttctgttaccaggaagcatactggtgatcgcgggaggaatagtttttggcccgctcttagggacactactatcattaattgccgccacgctggcctcctcgtgctcattcctgctggcgcgctggctgggacgtgatttactgctgaaatacgttggccatagccataccttccaggccattgaaaaaggcattgcgcgtaacggtattgattttcttattctgacccgcttaataccgttgtttccttacaatattcaaaattacgcttacggattaaccacaatcgccttctggccttatacccttatttcggcactcacgaccctacccggtattgttatttataccgtgatggcaagcgatctcgccaatgaaggcattacgctgcgctttattttacaactctgtctggcgggcctggcgctgtttattctcgtccagctcgcaaaactctacgcccgacacaaacatgtggatctgtctgcttctcgccgcagcccactttctcacccaaaaaatgaaggatagaacgatgttgcaacattattcagtgtcatggaaaaaaggactggctgcactctgcttactggctgttgctgggcttagcggctgcgatcaaaaagagaatgcggctgcaaaagtggaatacgacggactttcgaacagccaaccgctgcgtgtcgatgccaataaccatacggtaaccatgctggtgcaaattaatggtcgtttcctcaccgacgacactcgtcacggtattgtgtttaaagatggctccaacggacataaatcgctgtttatgggttatgcgaccccgaaagcattttatgaagccctgaaagaggcaggtggtacgccgggcgaaaacatgacgatggataataaagaaacgactcatgtcacaggcagcaaactggatatttcggtcaactggcaaggggcggcaaaagcgtattccttcgatgaagtgattgttgacagtaatggcaagaaactggacatgcgctttggcggtaatttaacggcagcagaagagaagaaaacgggttgcctggtgtgtctggatagctgcccggtcggcatcgtcagcaatgcaacatacacttatggtgcggtggaaaaacgcggcgaagtgaaattcaaaggcaatgcctcagttctcccggcggataacacgctggcaacggttacctttaaaatcaccgaataaagcaggataacggatgatgaagatgcaatcgcgtaaaatctggtactaccgtataaccctcatcatcctgttgttcgctgtgctgctggcatgggcgctgcttcccggcgtccatgagtttatcaatcgcagcgttgcggcgtttgccgccgtggaccaacagggtatagaacgctttattcagtcttacggcgcactagcggcagttgtctcgttcttgttgatgattttacaggccattgctgcaccgctacctgcgtttttgatcacctttgccaatgcgtcgctgtttggtgcgttctggggcggcttactgtcgtggaccagttcgatggccggcgcggcgctgtgcttttttatcgccagagtgatgggccgcgaagtggtggaaaaattaaccggcaaaaccgtacttgacagtatggacggctttttcactcgttacggcaaacacaccatcctggtatgtcggttattgccttttgtccctttcgatccaatcagctatgctgccggtttgacttcaatacgttttcgctcgttttttatcgccaccgggcttggtcaattaccggcgactattgtttattcctgggcgggcagcatgttaacaggcggtactttctggtttgtcaccggactgtttattctgtttgccctgaccgtggtgatttttatggcgaagaaaatatggcttgagcgccagaagaggaatgcctgatgggtttaccgccgcttagcaaaattcctttcattttacgtccgcaggcgtggctgcatcgtcgccattacggcgaggtgctaagccccattcgctggtgggggcggatcccgtttatcttttatctggtgtcgatgtttgtcggctggctggagcgcaaacgctcaccgctcgatccggtagtacgatcgcttgtcagcgcgcgcattgcgcaaatgtgcctgtgtgagttttgcgtggatatcaccagtatgaaagtcgccgagcgtaccggcagcaccgataaactgctggcagtggctgactggcggcaaagcccgctctttagcgatgaagaacggctggcgctggagtacgccgaagccgcaagcgtaacgccgccaacggtcgatgatgccctgcgcgcccgactggctacgcattttgacgctcaggcgctcaccgaactgacggcattgataggcctgcaaaatctgtcagcccgttttaattctgccatggacattcccgctcaggggctgtgccgtattcctgaaaaacgttcttaaggagagaagatgcgccattgtgggtggttgctgggattgttatcgctgttttctttggcaacacatgccagtgactggcaggaaataaaaaatgaggccaaaggacaaaccgtatggtttaacgcctggggcggcgataccgcaattaaccgctatctcgactgggttagcggcgagatgaaaacccattacgctataaacctgaagattgttcgtctcgcggatgccgcagacgcggtgaaacgcattcagaccgaagttgctgccggacgtaaaacgggcggttcggtggatctgctctgggtgaacggcgaaaacttccgcaccttaaaagaggccaatttattacaaacgggctgggcggagactctgcccaactggcgctatgtcgacacacagcttccggtgcgggaagatttttcagtgcctacagaaggggctgaatcgccctggggcggcgcacaactgacgtttatcgcccgccgcgatgttacgctacagccaccacaaacgccgcaagccttactggagtttgctaaagccaatcccggcacggttacctatccgcgcccaccggactttaccggcacggcgtttcttgaacagttgctgattatgctaacgccagatcccacagcattaaaagaagcgccggacgatgcgactttcgcccgcgtcactgcgcccttgtggcaatatcttgatgcactgcatccgtatttatggcgcgaaggaaaggatttcccgccttcgcccgcgcggatggatgctctgctgaaagctaacacattgcgcctgtcgctgacctttaaccctgcacatgcgcagcaaaaaatcgccagcggcgatttgcctgcaagcagttacagttttggttttcgcgaggggatgattggcaacgtccatttcgtcaccattcctgccaacgcgaatgccagtgctgcggcgaaggtagttgccaatttcctgctctcacccgatgcgcaactgcgtaaagcagatcccgctgtctggggcgatccttctgttctcgatccgcaaaaactgcctgacgggcagcgcgaatcattgcaatcgagaatgccgcaggatctgccgcctgtactggctgaaccgcacgcaggttgggtaaatgcgctggaacaagaatggctacaccgttacagtacgcattaatctttttgctgtgggcgatgatggcggtgatttatgcaccgctgatcccggcagctctgacgctgatatcgcctgctttgtcgttgacgcactggcaggcgttatttgccgatccacagttaccgcaggcattactggcaacgctggtgtcgacaaccattgcggcggtcggggcgttgttgattgccctgctggtgattgtggcgctgtggccagggccgaaatggcagcgtatgtgcgcccgtctgccgtggctgctcgccattccccatgtggcttttgccaccagcgcccttctgatctttgctgacggagggctgctttatgactatttcccgtatttcactccgccaatggacaaattgggtattgggctgggcctcaccctggcggtaaaagaaagcgcatttctgctgtggatcttagcggcagtattgagcgaaaaacggctgttgcagcaactcattgtgctggattcgctgggctacagccgctggcaatgcctgaactggctgctgttgccctccgtcgcgtctgcgttagcaatggcgatgctggcgattgtcgcctggtcgctgtcggtcgtggatgtggcgattattcttgggccaggtaatcccccgacgctggcggtaattagctggcagtggttaactcagggcgacgccgatcaacaaacgaaaggtgcactcgccagcctgctgctgatgctgttactcgccgcctacgttttgctgggctatctgctatggcgtggctggcgacgtactattccccgcgtagatggcgttcgtaagcctgccacgcctttattgccaggcaatacgctggcgagttttttacccttaaccggtgtgctgtgtgtggttctgctggcgatcctcgcggatcagtcgacgatcaatagtgaagcgctcatcaacagcctgacaatggggctggtggcggcattcatcgctttgctcctgttactgctgtggcaggaatgggggccacagcgtcgccagttgtggctatggttgcccattttattacccgctctgcctctggtggcgggccagtacacgctggcgctatggctgaacctggatggaagctggacggcggtggtctgggggcatctgctgtgggtaatgccgtggatgctgtttatcctgcaacccgcctggcagcgcattgattcacggttaattttgattgcgcaaacactgggctggtcgcgggccaaaatcttcttttacgtaaaatgcccactcatgttgcgccctgcgctgattgccttcgcggtgggattttcagtcagtattgcgcagtatatgccgacgctgtggctgggcgcggggcgttttccgacgctcaccactgaagcggtggcattaagcagcggcggcagcaacggtattctcgccgcccaggctttatggcaactgctgttaccgcttattatttttgccctgaccgcgttagtcgcaaaatgggtaggttatgtcagacaaggactccgctaatgctctgcgtgaaaaatgtttcgctacgtttaccagaaagccgcttgctgacaaacgttaacttttcagtagataaaggtgacattgtcacgttaatgggaccatccggctgcgggaaatccactctgttttcgtggatgattggtgcgctggccggacagttttcttgtacaggggagctatggcttaatgagcaacggattgacatgctacccaccgcacagcgtcagattggcattcttttccaggatgcactgttatttgaccagttcagcgtcgggcaaaatttactgctggcgctaccggagacatttaaggggaatgcccgacgtaatgccgtgaatgatgcacttgagcgttcaggccttgacggagcgttccatcaggatcctgccactttgtctggcggtcagcgagcgcgcgttgctctgctgcgcgcccttctcgctcagccaaaagcgttgctactggatgagccattcagccgtcttgatgtggccctgcgcgataattttcgccattgggtgttcagcgaaattcgcgccatggcgatccctgttgtgcaggtgacgcacgatcttcaggatgttcctcctgatagccccgttctggatatggcgcagtggtcagaaaattacaacaaactgcgataacgcaaagtttttcccgatgcgtcagttcagaatggcgctctcaaaactacaatgtcgggattttcgatgaaacgtgtttctcaaatgaccgcgctggcaatggctttagggctggcttgcgcttcttcgtgggccgctgaactggcgaagcctcttacacttgaccagcttcaacaacaaaatggcaaagcgattgatactcgccccagcgcgttttataacggctggccacaaaccttaaatggcccttccggtcatgaacctgccgccttaaacctctctgctagctggctcgacaaaatgagcaccgaacagctcaacgagtggatcaagcaacataacctgaaagccgatgccccggtggcgctgtacggtaatgacaaagatgtcgacgccgtcaaaacgcgactgcaaaaagcaggttttacgcatatctccatcctgagtgacgcgctaagcgaaccttcccgtctgcaaaaactgccgcactttgaacagctggtatatccgcagtggctgcataacctgcaacaaggtaaagaggttacggcgaaacctgccggtgactggaaagtcattgaagcggcctggggcgctccaaaattttaccttatcagccatattcccggcgctgactacatcgacaccaacgaagtggaaagcgaaccgctgtggaacaaagtttctgatgaacaactgaaagcgatgctggcaaaacacggcattcgccatgacaccacggtcattctgtacgggcgtgacgtatacgctgcagcgcgtgtggcgcaaattatgctttatgccggcgtgaaagatgtgcgcctgctggacggaggctggcaaacctggtccgacgcgggtctgcccgttgagcgcggaacgccaccgaaagtgaaagcggaaccggatttcggcgtgaagatcccggcacaaccgcaactgatgcttgatatggaacaagcgcgtggactgctgcatcgccaggatgcatcgctggtgagcattcgttcgtggccagaatttatcggtacgaccagcggttacagctatattaaaccaaaaggtgaaatagccggagcacgttggggacacgcaggtagcgactcgacgcatatggaagatttccataacccggatggcaccatgcgcagcgccgatgatataaccgctatgtggaaagcatggaatatcaaaccagatcagcaagtttcattctactgcggcactggctggcgcgcgtcagaaacctttatgtacgcacgcgcaatgggctggaataacgtctccgtttacgacggtggctggtacgaatggagcagcgatccaaaaaatccggtagcaaccggtgaacgcggcccggacagcagtaaataacattgcaattactgacgctggagcgacttcagcgtcagatacccactccacacccgcgtaaaggtcgtcatccagcacaacgcaccaaatacccacgcaaaccacggaaaacaggccggaaagaggcaactcagaacaaacagcaaaatcgtctcgctgccttcggttaacccgcccagataataaaacgatttatgcgcataaccgggattatcaatctgatgtttcgccgccagcgcagcaaaagcgagaaaactgcttcccgtgccgataaacgcaaacagcagccagccgcctgccagggcgttttgctccggtgcggcgaggataaacccaaaaggcaccagcgcgtaaaaaagaaaatcgagagaaatatcgagaaagccgcccgcgtcggtaagccctctgcgccgcgccagcgcaccgtccagaccatcaagcagcctgttcaacaaaatgacgattagcgccgccagataccagcccagcgccagaaaaggcagtgccagcacgccgatggcaaatcccactaatgttaaaccatctggcgtaatgcccggtttatcaagaacccgcacgcactgatgcaacaacggtttaatccggggatgaagatggcggtctagcacaggcactccttaaatataaaacctttctgattgagcaacagtgcggatattatggcatttttcgcttatctgcccgtgtgtaatttatgaaaatgattgaagttgttgccgccatcatcgaacgtgatggcaaaattttactcgcgcaacgccctgcccatagcgatcaggcgggattatgggagtttgccggtggtaaagtcgagccggatgaaagccagcggcaggcgctggtgcgtgagttaaacgaagaactgggcatcgaagcaactgttggtgactatgttgccagccatcagcgagaagtttcggggcggattatccatcttcatgcctggcacgtacccgacttccacgggacgttacaggcacatgaacatcaggcgctggtctggtgctcacctgaagaggcgctgcgatatccgctggcccctgctgacattccattattagaggcgtttatggcttcacgcgccgccagaccagcggattagtgcttagggttttgtcatcccgttggcattgcagcagtattccttcggctttaattactgccccttcagaataattttgatcctgataaacgcagcactgagtacagggctgcgctgactgcccgcctgaactgaacacttctggcggtacgtttacctccacgtccggatgataatgcgggttagccagtgtaattaatggaaatgctaatactacggcgatcaatgctcgactcacagggaactccttaacgttattgtctcttctacagataacggtagccgggcggcaaaactttagcgtctgagttatcgcatttggttatgagattactctcgttattaatttgctttcctgggtcatttttttcttgcttaccgtcacattcttgatggtatagtcgaaaactgcaaaagcacatgacataaacaacataagcataatcgtattaatatataagggttttatatctatggatcagacatattctctggagtcattcctcaaccatgtccaaaagcgcgacccgaatcaaaccgagttcgcgcaagccgttcgtgaagtaatgaccacactctggccttttcttgaacaaaatcccaaatatcgtcagatgtcattactggagcgtctggttgaaccggagcgcgtgatccaatttcgcgtagtatgggttgatgatcgcaaccaggtgcaggtcaaccgtgcatggcgtgtgcagttcagctctgccatcggcccgtacaaaggcggtatgcgcttccatccgtcagttaacctctccattctcaaattcctcggcttcgaacaaaccttcaaaaatgccctgactactctaccgatgggcggtggtaaaggcggcagcgactttgatccgaaagggaaaagcgaaggcgaagttatgcgtttctgccaggcgctgatgactgaactgtatcgccacctgggcgcggatactgacgttccggcaggtgatatcggcgttggtggtcgtgaagtcggctttatggcggggatgatgaaaaagctctccaacaataccgcctgcgtcttcaccggtaagggcctttcatttggcggcagtcttattcgcccggaagctaccggctacggtctggtttatttcacagaagcaatgctaaaacgccacggtatgggttttgaagggatgcgcgtttccgtttctggctccggcaacgtcgcccagtacgctatcgaaaaagcgatggaatttggtgctcgagtgatcactgcgtcagactccagcggcactgtagttgatgaaagcggattcacgaaagaaaaactggcgcgtcttatcgaaatcaaagccagccgcgatggtcgagtggcagattacgccaaagaatttggtctggtctatctcgaaggccaacagccgtggtctgtaccggttgatatcgccctgccttgcgccacccagaacgaactggatgttgacgccgcgcatcagcttatcgccaatggcgttaaagccgtcgccgaaggggcaaatatgccgaccaccatcgaagcgactgaactgttccagcaggcaggcgtactgtttgcaccgggtaaagcggctaatgctggcggtgtagcaacatcgggcctggaaatggcgcaaaacgctgcgcgcctgggctggaaagccgagaaagttgacgcacgtttgcatcacatcatgctggatatccaccatgcctgtgttgagcatggtggtgaaggtgagcaaaccaactacgtgcagggcgcgaacattgccggttttgtgaaggttgcggatgcgatgttaagccagggcgtgatttaatcgttattacaatcgtctggttttccttataaccagacgattttccctgagttaattaaatccttagcagacgtttgcaatttgcagccgtttgttctgcatcctgaatatcctgttcagacattaagcatcgcaacgcatctttttcaatccaggggttgttatttccggcaattgttagccacatccatgcttgtttattatcaattttagtgcccgtcccctgagcatacattgccgcagtctggtgctgcgcttcggtcgcccctaaacgcgccgctttttcgtaccagtgcagcgcatgattttcatcttttgcgatatattttgtaccgtacagatacatttcagctaacaaaaatatcgcctctattcgaccacgctgcgctgcaccagtaagccattgagtagcctctgcgttattttcaggatcatcattgttggttaaataatatttccccaattcatacatggcatcccctgccccatctgccccattttttgctgctttggtaaaccagtacagcgctttttcctggtcctgtggaatactctcacttccgctatacaacctggcagtatgatattgcgcatgtaaatatccctgttctgctgattgcaaaaaccaacgatgggcctgaacctcatcgcgctccacgccaatcccttgtatatacatttgtcccaactcatactgggcaacctcatgtccttgtgtggcggcagataaataccactgcaatgcttcttcataatttcgtaatggctcaacagcaaagcgtgagatacgggcaagctcatattgcgcagatgtgttgccattttgggcagcaagtaaaaaccattttcgtgcctcacaaatattcttatccgtgccccttccatcgctatacatgatacccagcgcatacagagcatcgataacattatgctgcgcggcgcgggtaaaccagttaaaggctaattttagatcctgtgaaacctcatcaccttcgtaatacattttgccaagagaataccaggctagtgaatagccttgctctgcagcatgtaagcaggactggtatacagaagatggataataaaaaagaccttttaattttatggcatttagcagctttttatatccactatgatgttgcattgctaaattattgaagcgttctgttaatttccacttgcgaatcattttttcttttcgcaaggaatatgataaacactctattaacaatgccatatagttgtctgatagttcaaattcagcaactttatttaatactgcgatatcaaaccatttcaggctctcttcattatcctttaatgattgataaatcgtagccatttccttcccgttttccatttcttccagtggagacaagttactggcaaagaaaggggtaatttgtttttcgatgcgataataaagaagacaactttcgttaatttctgtctggattacgggttgacgactgcctgcgactaaatgccatctgaacgtttgtgctgcagcgagagttaataatggccggaatacccgatgaagatgcagtaataacgtttcttcaaagcacattcgtgagctgagatcttttttctcaaggaaagataacgccttagcaagttgcatgggggcgtgttcgggggttgcttcattctcctcacagagcatatccagcacggctcgccaggtgaattccccctctgatttaatagtgacatcaggaagtggatgaccagaaaaggtgttgggtgcgcgaaatgtcatcacaggacgaggatgaacaatacccctggacatattgatcggttgctcttcttcctcttcttgccactgatcttcgtcgtcataacgtaaagcctgttcataagcatcgtgcaattgttgccaggctgcgggatcatcttccgggcggcaattttttaccagttgcgcataacgacgcttaatatctcgttcttccgcacctggttgtaaagctaatatttcccagcagttcattgcagacgttctctttccagagagtctaatgtaggttcaactttagtccgaaaatcagcaagttgatcaggatcctgcttctcgagtagataactgaaatgacgggagcaattgcttatccagtctcgcgtttccgccagggtgagttgatagagattatcaagacgggcaataaaggcctggtttatctgttcatcgcgtgggtgaatttttaacaggcttaatttggacaacgactgctgtatttgttctgccgttaatgcccctggattctgttcaataaccagactatttttagcacctgtcagtggcacgctgatatcgacatcaagaataccgttaatgtcgtacgtaaaacgaacatcaatacgcacatcaccggccggttttggcggaacattcactgacaactccgcaaggaaaatattatcagccaccatcctgctttcaccctggtagattttaaaattaacctctgtttgttgatcatgtgccgtgtaaaaggcacgaacgcgactacaaggaatactcctgttacgctcaataacgggtgcaaaatagcctgattcgcgggtatgccccagcgatttagaggtatcaacgccaagcgtataagggcaaacatcagtcactacaacatctcgtaattcgctgtgccgcgctttaagtgctgcctgaatagccgcgccctgggcaatgacttcatccgggtttaaatgcattgccggtatacgaccaaataatcgtgtcacaagtttgcgaatcagtggcatacgtgtagtgccacccacaagaacaacctggtctaattggctaaaattaattttggcatcgcgaattgcccgctccagtggcatatggattcgttcgaaaaaggtctgtaataaaaattcaaatttttctgtagtcagatgccagtaatatcgccttccttcaatctccacactgaaagtggcttcatctcgcacactcagcacgcgtttgacacgctcagcctcgatgcgtaaatgccgctggagtgtcggttcacgccattcaatattttcaggaagatcccgacgtgagcaatatgcatcgatcaggatatcgacaatatcttcaccacctaaaaagttatccccggcactggcacgtacttccataatattgtcaaacaactccagtatggagacatcaaacgtaccaccacctaaatcgaataccagaaattgatgttcatcatccttattatgcaaaccatacgccagtgcagcggcggttggttcgttaattaaacgttcgacatttaagcctgccattgtcgcagcggcttttgttgctttacgttgcatatcaccaaaatatgcgggaacgctaatcaccgcttcagtgacttcttcgcccaaatagttttctgcatcttcttttagctgacgtaatatcaacgatgagagttcttccgcacgaaattcccgtccgcccagttttaacgtctttgatgtgcccatcatgcgtttaaaatttgatgcgcagttttgtggtttgatgagttgcaggtcacgagctgcctcccctgtcaaaaccataccatcttcgtcaacacaaactacgctgggtgttaaaaacttacctaacgcattggggatcagttcactttgtccatttcgccagacagctgccaaactgttagttgtacccaggtcgataccgataatcatcgtaattctttttaatatccttataaaataattgttttaaatggtggtatttaaaccaccattttgttcttaatttttgtataaagaccaggtacgttctagtatttttaatgcagcaggtaactgctcaatcattttaccagaaacttcataatcgctttctttgttgtttaatggattaacagcaacgtaggaaatcgttgatgttggcttaattattttaaaaacttcctttgcagattcaccatagatgaaaggtaactttgaattaatagagatttcttgtttatcgaccataaacctggtaatagcagagaaatgagtctccccatgacttataacatagcctttcggaacgttaatttctttcagctcaggaatatactgaacataaaactgtaaatctttcacatagcaaaattttgcactactatcattattcttcgatttacggttttcgcattccatttcccatgaaaatagtccgtctccgatgtaacctgcaactacgcgtccatgacttaaatggtatgcaacgccgtcaacagtgccttgctcttctgaagaaaaactgaattctttattttcttcattatacggactgatagaacaaactatctttccttgaggaaaaattggtcttttggtgaataacatatcctccgacaaaatggtaaaaccatcaatggtggtaattgtttttttaattaaatactcactgcaattgacttcctttaaggcttcttgtttttgagcccatgataattctgcagttgttaatttacgataaaatttttcagtgtaactttcagccgccgcaaagtgtgacagtgacgataaaacaataattcccatgaatgtttttttcatgtatatatccttataggtatgcttatcaaataattcaatggaagtatatcgataaaaataaagccgaacatgttaataaacatactcggctttattttcggaattacacccctattgttcagtcacgcttaactgtagcatcctttttctgcgcagtttttttgaccctttttttcacgtctttatttttctcgtctccgttccttggtaccacaattcctttaaaccgtctgaccggagtgctacgagcctgatcaatcaactggtacaatgtccccaccagcggctgcataaagtcctgatagcgacactgcttttcgctgatttgcgtcagcaccgattcccagtgcgcggtcatgtccggtcgcgtcgccatttctggcagcgaatggaatagcgcttttccggcgtcggtggagtggatatagcgcccttttttggtcaggaagcctcgcttgaacagcagttcaataatcccggcgcgagtcgcttctgtccccagaccatcggtcgcacgaaggatctttttcagatctttgtcctgcacaaagcgtgcgatcccggtcatcgccgaaagcagtgttgcatcggtaaaatggcgtggcggctgggtttgccgctctaccacttcacctttttcgcacaacaattcatcgcctttcgccaccacaggcagcggcgtgccgtcgttttcttcatcgcgctctttgctgcctaacagcgtgcgccagcctgcttcagcaagaaaacgggctttagcgacaaatttgcctttggcaatgtccagttcgataacacacttgcggaacaccgcatccgggcagaactgcatcaaatactgacgggcaatcaggttatagaccttcgcttcgttctccgtcaggttgatcgcagaactccgtgcggtcggaatgatggcgtggtgcgcatcgacctttttgtcatcccaacagcggttgcgtatatctggatctaccactggctgcggcaacagatccggtgcatgaacgctgatagcattcatcaccgcgtggcgtccggcaaaatgttcttctggcaaatagcggcaatcggaacgcggataagtgattagcttgtgcgtttcgtacagcttctggcagatatcaagcacgttctgcgcgctcagaccaaaacgtttagccgcttcaatctgcaacgccgaaagcgaaaaaggcagcggcgcggattctgattcccgtttatcgttatagctggtgacaatagctggttgaccactaatgcggttaaccacatgctccgccagtggacgatgtaacaagcgcccttcttcatcctggtacggttcacacgcttcgctcggttgccagatagcggtaaaccgctcatctgcaggtgtcacgatatgtgctttgacttcaaagaagtctttcgccacgaagttttcaatctcttcgtcgcggcgcaccaccagtccgagtacgggcgtctgcacgcgtcccacggaaagcacgccctgataaccggcattgcggccgagaatggtatacgcacgggtcatattaatgccgtacagccagtcagcccgcgcccgcgccagtgcagaaacgcacagcggtacaaactcgctattggagcgaagacgatcgatcgcccgctcaaccgcctgcgggttcaggtcgtttatcaaacaacgctgtacctgctggcgcttttccggtgctagttgcaggtagtccagcacttcatccaccagcagttgcccttcgcgatccgggtctccggcgtgaacgatttcgctggcttcatgcaggaagtgtttgatgacattaagttgtttagtcacggagggtcggggctgtaattgccacttttccgggacaattggcaaatccgcaagattccagcgcgcatagcggctgtcgtaggcgtctggctgcgcctgctcaagcaggtgaccgatacaccaggtcaccacctgaccattaccgcactcgataaagccatcgcctttccggtgcggtttaggcaggacatcagcaatggcgcgcgccagactcggtttttcggcaataaacaaccgcattgaattaacggatctcaaccatggcacgaccgccgcgcgctggcaccagttcgccaatcgccgtcagttcaatgccaaactcggcggctgtagctttgacctcattttctgcttccggcatgaccgccagcagcaaaccgccagaagtttgcggatcgcacagcagatcgcgcacttcacgcggcatttcacccatcagatgaccgtagctggcaaagttacgttcggtgccgccaggcactgcgcccaacttaatgtactcttcaacccccggcaatttcgggatcgcgtcatagtcgacgcgcgcctgcacacctgcgccctgacacatttcgcttaaatgccccagtaaaccaaaacccgtaacgtcggtcatcgcttttacgccttcgatgttggcaaaggacgcgcctgcgatgttcatccggcacatcacttccgtcgccagtccctgatgttctggtttcagcagtgattttttctcagccgtggtaagaacgccaatccccagcggtttcgtcaggaacagtttgcatccggcttgtgcggtactgtttttcttcacccgctcggtcggtacgatccccgttaccgccagaccaaaaatcggctccggcgcatcgatggagtgaccgccagccagcgcaatccccgcctgacggcatgcatagcgtccaccttcggtcacttcgcgggcaatttccggggaaagtttgttaatcggccagccgaggatcgcaatcgccataatcggtttgccgcccatagcaaagatatcgctgatggcgttagtcgccgcaatgcggccaaaatcgaaaggattatcaacgatcggcataaagaagtcggtggtactgataacgctggtgccattgcccagatcgtataccgccgcatcgtcgcgggtttcattacccacaagcaaattcggatcaacaaacttcgcctgctcactgtgcaggatggtttccaacacttttggggaaattttacagccgcaaccagcgccgtggctgtattgggtcaaacgaatcgagttctcgctcatggacatctcctgtcaatgcaatccgggtatggtaaccctcattccatgaagtgataagtgagagtgtctgaattcctgcgcctttgctcacaatccagacagtttcgcgacaattatcagaaataagtcacaaacggcgtcgggtccgggacgtttatcgacgtagatgctttcaactgcggcgtaccgaggtagagaaaaccgacaattttatcctgctcacggcaaccgaatgcttcacggactaccggactttcagttaatgcaccactgcgccagatgccgccaaacccctgggcaactgctgccatttgcatcgccatgaccgcgcatcccgcagacatttcctgttcccagcgcgggactttatgattttcttcgcatttcgccaccaccgttatgatgagcggtgcgcggaacggcgcattacgcgctttgttgattgctttgttatcactaccggcagcaatcgccccctgctccagtacagcgctgaaacgctcgcgcccttccccttcaatcacaaagaaatgccacggttgcatggacttatggtccggcgcacgcatacccgcacgcaggatgttttgcagttgttcacccgttggcgcgggttcagccaggcgggaggcgctacggcgattgatcaatagttcgagtgcatccatttgattaactcctgtcatgatatttattcacaaaattaacacgagagtggattttgttacagcccagtccgcaattcctgctgacaagtgccggttgggtcattacgataaccacatctattgcgcctgaaacaggtgtgaccttaagttgggagaatacatgcgaaccctttggcgatttattgccggattttttaaatggacgtggcgtctgctgaatttcgtccgtgaaatggtacttaacctgttctttatttttctcgtgctggttggtgtggggatctggatgcaggtcagtggtggtgattcgaaagaaacggccagtcgtggcgcactgctgctggacatttctggtgtgatcgtcgataaacccgacagttctcagcggtttagtaaattaagccgccagctgcttggtgccagttccgatcgtctgcaggaaaactcactgtttgatatcgtcaacaccattcgccaggcgaaggacgaccgcaatatcaccggtattgtgatggatctgaaaaacttcgcaggcggcgaccagccgtctatgcagtacatcggcaaagctctgaaagagtttcgtgatagcgggaaaccggtttatgccgttggcgagaactacagccaggggcaatattatctcgccagtttcgccaataaaatttggctgtctccgcaaggcgtggttgatctgcacggctttgccaccaacggtctgtactacaaatcgttactggataagctgaaagtttccacccatgtgttccgcgtgggtacgtataaatctgccgttgaaccgtttattcgtgatgatatgtcgccggcagcccgcgaagctgacagccgctggattggtgagctgtggcaaaactatctgaatactgttgccgctaaccgccagatccctgctcagcaggtattccctggcgcgcaagggttgcttgagggtttaaccaaaaccggtggcgataccgcgaaatatgcgctggaaaacaagctggtcgatgcactggcatcgagtgccgaaatcgaaaaaactctgaccaaagagttcggctggagtaaaactgataaaaattatcgcgccatcagttattacgattacgcattgaaaacgccggcagataccggtgacagtatcggtgtcgtcttcgctaatggcgcaattatggatggcgaggaaactcaggggaatgttggcggtgataccactgcggcacaaatccgcgacgctcgccttgacccgaaagtgaaagcgattgttctgcgtgttaatagtcccggcggcagcgttaccgcgtctgaagtgattcgcgctgaactggcagcagcccgggcagcgggtaagcctgtggttgtatcgatgggcggcatggcggcatctggtggttactggatttccacaccagctaattacattgtggctaaccccagcaccctgaccggttctatcggtatcttcggcgtgatcaccaccgtagaaaatagtctggattcgattggtgttcatactgatggtgtctcaacttcaccgctggcagatgtttctatcaccagggcactgccgccggaagcgcagcagatgatgcagttaagcattgagaatggctataaacgctttatcacgctggttgctgatgcgcgtcattcaacgccggagcagattgataaaatcgcccagggtcacgtctggaccggtcaggatgcaaaagctaacgggctggtcgatagtctcggggatttcgatgatgcggtcgccaaagcagcagagctggcaaaagtgaaacagtggcatctggaatactacgttgatgaaccgaccttcttcgacaaagtgatggacaacatgtctggttctgtccgggcaatgttgccagatgcgttccaggccatgttacctgcaccgctggcctcggtagcctctaccgttaaaagtgaaagcgacaagctggccgcgtttaacgacccacaaaaccgttatgcgttttgcctgacctgcgccaacgtgcgttaagtcttgtactaagtggccgacagatcgtcggccacattactttttacgtcgacgaatcctcttcccgctgtctcgccacatatttccttatcctcatagtatcaggtgcgctccccctgcctcacgtatatacttttgctctttcgatatcattcatatcaatatcatgcaaaagaaatcaatttacgtcgcctacacgggcgggaccatcgggatgcagcgttccgagcagggttatattccggtgtcaggtcatctacagcgccaactggcgctgatgccggaattccatcgcccggagatgccagatttcaccattcatgaatatacgccattgatggattcttctgatatgacgccagaagactggcagcatattgctgaagatattaaagcgcactatgacgattatgatggttttgtcattctgcacggtacagacacgatggcgtataccgcctctgcactgtcgttcatgctcgagaatctcggtaaaccggtcattgtgacagggtcacaaatcccgctggctgagttacgctctgacggacaaattaatctgctgaatgcgttgtacgttgcggcgaattatcctatcaacgaagtaactctcttttttaataatcgactgtatcgtggcaaccgaaccaccaaagcacatgccgatggttttgatgcgtttgcctctccaaaccttcctccgttactggaagcaggtatccatattcgtcgtttgaatacgccacccgtcccgcacggtgaaggggcattgatcgttcatccaatcacgccgcaaccaattggcgtagtgacgatttatccggggatttctgctgacgtcgtgcgcaattttctgcgccaacctgtgaaagcattgattctgcgctcatatggcgtgggtaatgcgccacaaaacaaagccttcctgcaggaattacaagaagccagcgatcgcggtattgtggtggtcaacctgacacaatgtatgtccggtaaagtgaacatgggtggttatgccaccggtaacgccctcgcccatgccggcgttattggcggtgcagatatgactgtagaagccacgctaaccaaactgcattacctgcttagccaggaacttgatactgaaaccattcgcaaggccatgagccaaaacctgcgtggcgaactgacgccggatgattaaggagactgcaatgccccctcgcgccctgttactggtcgatttacaaaatgatttctgtgctggtggcgcgctcgccgtgccggaaggtgacagtacggtggatgtcgctaaccgcctgattgactggtgccagtcgcgcggtgaagcggttatcgccagtcaggactggcacccggcgaatcacggcagttttgccagtcagcacggtgtagagccttatacgccgggccaactcgacggtttgccacaaaccttctggcccgatcactgtgtgcagaacagtgaaggcgcacaattacatccgttactgaagcaaaaagcgatcgcagcggtgttccataaaggcgaaaatcctttagttgacagttacagtgccttttttgataacggccgtcggcagaaaactgcgctcgatgactggttgcgcgctcatgtaatcaatgaattgatcgttatgggtctggctactgactattgcgttaagtttaccgtgctggacgcgttacagttaggctataaggtgaacgtgattaccgatggttgtcgtggcgtaaatatccagccacaggacagtgcgcacgcgtttatggagatgtcagcagctggggcaacgctatatacgctggcagactgggaagaaacgcaggagtaattttacgctggcctacaattctgtactggcattgtaggccagataaaacacatcagtgatacatctggtaattgacgccatcaacgaaagatttaattcacctcagaaatctcttccagcgacaccttccgcgtttcgatgccaaaaatggagagaaccagcgcacagagcactaacatgacaccaagcaccataaacaccgtgatcgacccataatgtgttaataatgccgcaacgccatagggcgtgaagactgcgacgatccgtccgacggcattaacgaaacccgaaccacgcaggcgtaaatgcgttggccaaagttccgggatataaaccgccgacgcgaagcacacatacatgtataaaaagaagatcatcaccaggccatagattaaaatcgcccactctgtagtctgaattgaatagatatagcctaacacagcaataataataagtaaggcagagccaaataatcgacgaggaaaatgatcaataattaatgccgcaataaatatccctaccggagcgccaatcataataacagcggtcattaatattgatttatcaacatcaatgccggagttaacaaatatggtcggtatccatacggtgatggtataaagcgaaatgttcattgcaattaaaacagtaatcgcgactaatgtacgtcgtaacatttcccctttaaacaggagccagaaggtacccttgattaccttaaccttgctgttgctctggttcaaagtaagcgggggtaaacgaatactcttctctctttcaatttgctgctctacttcacgaagttggctttctgcacctgcgatttgccctttccctgccagccatcgtggcgactcaataaagtatttacctgagagaaaccacgctaacagtatgccaataccgcccagcagaaacattatccgccaactaaaaaaagcgataaccaccacgcctatcgccgcagagagcatgggcgaccagttaccaacaaatgagagccgcgcggaccattttccacgcaccgtcgcggggataaactccgtaaatgaggcatagccaaccataatcagcgcccccattcctgttcccatcaggaagcgaaagaagatgagccagtgcatatcagggacaaaagcggcccctgttgccgcaataccgacgatgagaagatttatgcgaaacgccctgcgccgcccaaagtagtcaccaataaacccaccggtaagagagccgatgaaataaccaaacattaatgccgaggtaaaggcggcattgaggaaattatttgaccatccattgcttaccagctttgctaagacgacattaccggagtaactcaaaaaacccgttaataacagactaaagcttattataccaaatatacgataatgaaaccgggccaaaggcaagcggtccagtcttgcgccaatttgatcatattgttccattgggtgcctcggatttgctaaaaaaggtagcaattgcggcaaattcacttgccgcatctttatcatcattttatttccaggcgcaggaacaaataatattgacaatgtgtgcttaaattaccacaccagctggatattattgtctttgcaaaatgctatccactctgcacccggtgatttatcagttattatgtaattaatatgactaaagtcagctaactggacaaaagctttgcgatcaaacttagagtgatcaaccaataacgcaacttctgtcgcttgacggatcattgtctttttgatttcagcttccgcttcattagagtccagcgcgccgctgttaatatcaagacctttacaactcattaccatgatatcgacatggtagcggctgatgatctctttagtaattcttccttgcagtgaaagtgtatttttgtttagttccccacccgttgaaacgactttaatttctgactgagccagaacatgaatcgcttccgccgagttggttagcaacgtcaggtcactacggtcctgtaacaatttgagcaattccattacggtactactggaatcggctgccatggtggttttattgtcgatgaagggtagtgccttgcgtgcaataagctgcttctcttcataaaacgatgaagcgcgcttataaaaatggatattctccgtcaacatcgctgtatttaaaacagcaccaccataggttctggtcaaaaagccttcatcttccaacttctcaagatcgcggcgaatggtttcttcggttacctgaaaaatcccactcaaatttgagactgtcacctttttatcgttggcaaccatttgcttaattgcctgaatcctgtcttttgccgccacgattacacccctgtatctttttacatcacattagcgcaattatcgcataatcgatgtttactttcaaaataacatgtctgaatcacagattttcatcacagttttcacagaaacagaggtgaatcgtgttgagtatttaacgctctagggcctctgccatttccctcatcaatgttgcgtctgcatccgataagttgatattcagtgccgcgacattttcacgtacctgttccggcgcagtagccccactaagaatggagattaaatcactctgttttaatatccacgccagtgccagagtgggaattgtgcactgataacgagcacagagtggctgccactgttcaagcatatcaatcactttcagcatgttttctcgctggaaccagactttatttgcccgagcgccgcccggaacgtaatcacgcgtgatggtcccggtcaacaatccctgctctagcggagagtagacctgtaccacaatgccattatcacgacatagcggcagcagttcgttttccattgcccggtcgaggatactgtatttcgcctgaataatatccagttcaccatgttgcagatactcgcggatatggtcagcatcgacgttagcagcgcctatagcgcgaattttcccttcggcctttaacgcattaagcactgcgacagtttcagctatcggcgtaaaaaatggcggcaccgactgccagtgcgtcatgtagatatcgatgtaatcaatacccagacgttgcaagctggcttctacctcttcgcggatagattccggagaaaggtttttatacaactgtcgatcgccaactttgttgaataaactcccttttcgttcccagacaatgccgcatttggtttctactacaacctgttcacggggcagtttttttaacgcctgaccaacgataacttcactattgccaaagttatatcctggcgcagtatcaatcaggttaatgccgcaacgatgggcttcaagaatcgtatcaatgcatatttgtcgatcgagatcgccattccatgcaggaccgccgccaatggcccatgtccccaaccccattcgcgaaagcgttatatccgttgtgcctaaaggtatctttttcatttgccttcattatccttcgtattcttccagcaattgttcgaccagctttctgttttttacaccggtggtggcgccgatgcttagaaccgagatagccgccgttgcattggcaaagcgtgcgcattcacgcagatttttaccttctaacagtgctgcaataaaacctgaagcaaagttatcgcccgcaccaatggtgtcgatagcggttattcctgcgaccgccggcaccttcatcgtcatgtcaccacgcttgataaagcagccgtctttacccgttttaatcaccaccgtttttacgccgcacgcaagaaagcagtcagcaatttcatccagtgtctctttcccggtgagtaattttgcctcggcaaaattaggaaacagataatcgacataactcaatgcttcgcaaatatcattcagcgtttcattcaaccgcggtttgatcatatcggcacagataatcatctgccgggctttagcttgcgtaaaaatttctgttagcgctctaccatccaatagaggactgttgaaaatactggccagtgataataatttcgcctgagaaaaccgtgcaaaatcaacatcgtcaatattcaatttccacagactgccgttacggtttgtgacaaaggtccgctcgccatcctccgtcaccagtccaacgttaatagaggtatctatgctgacgtcctgcttcaggctttgaatatcaatattctctttgcggcaatggtcgagaataaattgccctgcggcatctttaccaatacgactcattaatgctgtgcgatggcccagacgagaaataattgttgcttcatttattgcatcccccccggtggtcattgcgattctttcaagaggataagaatccacatcaaagatatttttactgaccggttgcaatggaatatcaacaatagcggcacctatacaaataacgtcgagattatccatattattattccgctttgccatcagaaccgaacagtttaattttatccaatgcccgttcttttacagctttacgcacttcacgttctaaatgcaggaaaggctgatcctggttttctttcactgctaccattgcggcctgacagaggtccgtatgaatgttgattttcgcaatacccaacgaaattgcagttttaatgtcggcatcactgatccctgatgcgccatgcaaaaccagcggaacagaaacagcatcgcgtacgcgtttgacgacctcaaagttcaattgtggctctgacgtataaaccccatgctggttgccgatggcgacagccaatgagtcacagcccgtacgttcaacaaattcagccgcctggtcaggatcggtatagtgatagcccgccagcgcttcctcataaacggtttcattaccaacatgccctaattccgcctctaccggaatacccagcggatggaagaaatcaacagcctctttggttaaacgaatattttcttcgaaatcaaatgcagaagcatcacgcattaatgaattcataccatgagtccaggcgttatgaataatctccatactccgaccatgatcccaatgagttattaccggcaccgttgctttttgtgccattgataccatcatgtgagagaaatcttcaaatgaggtgttgccgacaaaacctgtgccaaaagaaataataaccggtgatttcgcttcttcggctgcgtcgataacgcccatcaacatttctgcattccatacgttaaaatgggcaattgcataatgtttatttgtggcatcgttttcccaatatctgatatctgcgagcatgttctgttctcccgtattaattaatcgctaattttaataacgcctttaataatgtcgcgtttgttgttaactgactcttcaaatgcctgttgtacatcccgataatcgtaaatatgcgtcaccatcgatttcacatcgaatcgccctgaggaaatagcttcaatcgtgaccggataacgattggcatagcggaataccgtctggatagtgacttcgcgattgattttgaggaaattgattgccgaatcgccgggtacagtaccaacaatcataattttaccgccgcgcatgaccagataaggtgcctgtttaacggtgaccgcagaacccgctgtttcaaaaacaatatctgcgcccatgtcttcggtaaattgctgacagcgtgcaatagtgtcttcttttgcgccgttaataaccactgtcgcgccgagctgttccgccattgtcagacgtttttccagcacatcaacgacggcaatttccgttgctcccaggcatttgcacgcttgcaacgtcatcaaaccaatacaacccgctcccagaataattatcttcttaccaggtttaacatctgccagcatcgcggcatgcatcccgactgcggcaggctccaccagcgccccttccatcgtgtccatattgtctggcagtttgtaagtaaagctctccggatgacacagatagtgcgttaatgcgccgcggtagttgggttgtgtcgccataaaatcaacgtccgggcaaatgttatatttgccttccagacagtaacgacagtgaccgcaaggaacgccaggttcgatatttacccgatcccccggtttaaatttgcgcacgcggcttcccacagccacaaccgtcccggcgcattcatgacccaggccaatttcttgatttgggtctttaggaggaataaacgggcctgattcaaaaccatgtacatctgaaccacaaataccgacatattccactttaatcaaaacttcatcttctttaggcacaggtatttctgctgaaataattttcattgtgcccggcacctgcaatattgcttttgaatttttcattttgaatccaccagtattatttattggctactgcatcaatacttaaactttcaacggagacacctttggtttcaattccaatggtggcgatagcaattgcgacaataattgaaacagcccccagaagaataaagactcccgttacgccataactactgagcagcactgcaacggcataaggcgcggcaataccactgattcgccctaccgcattcgccagaccggagccacggagtttggcctctgttggccagatctcagggacatacactgccgaggcatagcaaacgtacatatagacgaaagtaatcaggaagaaaccaatcagcgttatgagcaacatactggtttgcagtgaatagatatatccgagcaccgcaatcaggattaatagccccatccccattgttttacgcggaattttatccatcaccagcatggcaataaaaataccaaatggcgcgccaaacatactcatggtatttaaaacaatcgagtcttttaaattaattccctgggtcatgaatatcgttggcaaccagttaattagtgtgtactgcacaacgttcatggcaatcagcacacaagagcctaatatcacgcgtttcagtaatactcctgtcagtaaggctgaatacggcaccgcttgtggtgctttaccgtcatcagcaataaccacaggcggcaaaggtttacccgtctggcgtatgacgccttcttctatactccgcatgactttctcggcttcctgataacgtccgcgcgattccagccagcgcggggattcaggaaagtagcgccaggccagcgccgtagcgataagtgacaatattgcagggataagcagttgtacccgccagttccactctgcactaatcagcggcgtgagtcccatcgcaatcaatgaacagagcggatatgaccagttaccaataaaggaaacccgactggaccacgttccgcgatttcttccgggcatatattcggtgaaaccagcaaacagtgtaaccagtaaagctcccagcccaacgcccatcacaaaacggcaggcaataaggaaatccatattcggtgagaaagcaccgacaaccatcgaagcaatatgaatggcctcatagaggataaacgcatttctgcgaccggttttgtcaccgatgatgccgcccaccagcgcaccgagaaacattccggcggtcgtgattgctgagaatgtggcagtggtggaattatctgtccagcccaacgctttcagctgcgcgaggatcaagccaccaacggcattactccagcagacaagcaagccaaacgcgacgatggcaaacattgacgaatgccagcggcaatccggtaagcgatccagccgtgcaccacaatgcggttttgttatctgttccatgcgataacgttccttcaggagagtagttattcatcaaagtcgtaagtcatgatcactttgattgcagttttatcgaccatcgcatcaaacccttcgcgccattgcgacaggccgatacgatgcgtgatcatcggtttgactttgatcgcgccgctggctaatagcctgatagcgttacgccatgaggtggagtcataggccatatgcccaatgatgcttttgttccaggcggtaatgtcattaatcgagaaatcaagaggtttgaagcccattccaacgcgtaccacttccccgttcggacggagcatttcgatggcttgtttcagtgcgatattggcaccggagcattcaatcaccagtcccagattgtctttgccacaaatttgctggcagcgcgccaccacatcttcggtagaaccatttactactgccgtcgcacccagttcttttgcaaccgggaagcggaccgccacatcttcttgtagaccaacgacgacgatatttaccgcccccataatccgcgccatttgtacggagaacagcccgagtgggccagtgccgatgacgaccacatcctgaccagggaggaatttcgattgctgcgcgatggatttgtaggcattacagatagggtcaagtacggctgcgtcctcataatcaacaccatcagggatttcccacaacgcatgacgatgaattttgagaatttcaccaggaacaagacaatatttggaaaaaccaccgccccaggtattgttatccagaccaaggtttactttttctgtacaacacagaaaatcaccttgttcacaggccgggcaaacgccgcaaacgtgaccgctgttatccgacacgacgcgttgccccactttccagtctttgactttttcaccaacctgcgcaatacaacctgcgaactcatggccgcggatagagttaaactcatccgaaccgctatcgacattgtagtgcttcatgtctgcgccgcagattgccgcggctttaatttcaatcacgacatcttccgggccacaaatgggttgtgggacatcaatcatcttgtagccgccaaaggccttgccaaaccgagccagtgctttcattgcgtcatcctctgtgttttgttttgcttagatggtcatcatacttacccacatgatttttgaggtcaacattaaatctgtaaaacacagataatgatctgcgttttacaacttagatcacaattacgcagaaaatggctggggctgttacaggttgatggaaggcgggacgcaaaaagagcaaattcgagagggattaccggccaaataggcctgagacttaagttcaggagaagtcattcaggtgagaacgcgactgcaagagatcggactgggacttagccaggtcggggcgagataattgagatgagtcgtggggtcattgttggctatcccctttataaccgcggcaaaaaggggataaaccacttacttaaacatggcaataggctttgctgagataccaaaatcttcttttaactgctgtttgctcttcatgaccatctgaccatttgtgtcaattgtcatatgctgtgcttcggtattatggcgggcttgccacagcatcaccagttgcaggcagttctctttttgttcctcggtcaacgtaacgccatcaggccatttccccagttcaacggcggtcgacaaacgctggtatacttcaggcgtcatgctgttgataatgtcatcaagattcataatttttccgctcctgtggaataagttgctgaatcgttttttcaaccgttgatttcttcgccgttttcgccatcagtgaagcgtaaagaagcagagttaacacaataacgttcgcccgttggctgcggcccgtcagggaagacatggcccagatgggcatcgcagttaccgcaacgaatttctatgcgctgcattccatgtgacaagtctttgatataacgaatagattcttcactcaccggttcgtagaaactgggccagccacagccggaatcatacttggtttgggaatgaaacagcggggcatcgcagatcaaacagtgatatacgccgtcacgcttgttatgcagtaaacgacccgtaaatggcggttctgtcccatgattctgcgtcacgtagaactgcatctcggacaaattttttttcagttcttctgccgaaggtttattagccatttgctcacatctcactttaatcgtgctcacattacgtgactgattctaacaaaacattaacaccaactggcaaaattttgtcctaaacttgatctcgacgaaatggctgcacctaaatcgtgatgaaaatcacatttttatcgtaattgccctttaaaattcggggcgccgaccccatgtggtctcaagcccaaaggaagagtgaggcgaatcagtcgcgtaatgcttaggcacaggattgatttgtcgcaatgattgacacgattccgcttgacgctgcgtaaggtttttgtaattttacaggcaaccttttattcactaacaaatagctggtggaatatatgactatcaaagtaggtatcaacggttttggccgtatcggtcgcattgttttccgtgctgctcagaaacgttctgacatcgagatcgttgcaatcaacgacctgttagacgctgattacatggcatacatgctgaaatatgactccactcacggccgtttcgacggtaccgttgaagtgaaagacggtcatctgatcgttaacggtaaaaaaatccgtgttaccgctgaacgtgatccggctaacctgaaatgggacgaagttggtgttgacgttgtcgctgaagcaactggtctgttcctgactgacgaaactgctcgtaaacacatcaccgctggtgcgaagaaagtggttatgactggtccgtctaaagacaacactccgatgttcgttaaaggcgctaacttcgacaaatatgctggccaggacatcgtttccaacgcatcctgcaccaccaactgcctggctccgctggctaaagttatcaacgataacttcggcatcatcgaaggtctgatgaccaccgttcacgctactaccgctactcagaaaaccgttgatggcccgtctcacaaagactggcgcggcggccgcggcgcttcccagaacatcatcccgtcttctaccggtgctgctaaagctgtaggtaaagtactgccagaactgaatggcaaactgactggtatggcgttccgcgttccgaccccgaacgtatccgtagttgacctgaccgttcgtctggaaaaagctgcaacttacgagcagatcaaagctgccgttaaagctgctgctgaaggcgaaatgaaaggcgttctgggctacaccgaagatgacgtagtatctaccgatttcaacggcgaagtttgcacttccgtgttcgatgctaaagcgggtatcgctctgaacgacaacttcgtgaaactggtatcctggtacgacaacgaaaccggttactccaacaaagttctggacctgatcgctcacatctccaaataagttgagatgactctgtgatctaaaaagagcgacttcggtcgctcttttttttacctgataaaatgaagttaaaggactgcgtcatgattaagaaaatttttgcccttccggtcatcgaacaaatctcccctgtcctctcccgtcgtaaactggatgaactggacctcattgtggtcgatcatccccaggtaaaagcctcttttgcattacagggcgcacaccttctctcgtggaaacctgcgggtgaagaagaagttctgtggttaagtaacaacacaccgttcaaaaatggcgtcgccattcgcggtggcataccgctttgctggccgtggtttggtccggctgcacaacaaggtctgcctgcgcacggttttgcccgcaacctgccgtggacgctgaaatcacatcgtgaagatgctgatggtgtagtgctaacttttgaattgacacaaagcgaagagacgaaaaaattctggccgcacgactttacgctgttagcgcatttccacgtgggtaaaacctgtgaaatcgatcttgaagcacacggcgaatttgaaactacctctgctctgcatacctactttaacgtgggtgatatcgctaaggtaagcgtcagtggactaggcgatcgcttcattgataaagtaaatgacgcgaaagaagatgtactgaccgacggtattcagaccttccctgaccgtaccgatcgcgtgtatctgaatccgcaagattgcagcgtaattaatgacgaagcgctgaatcgtattatcgccgtaggccaccagcatcatctgaacgttgtaggctggaacccaggaccggcgctttcagttagcatgggcgatatgccggatgatggctacaagacctttgtttgtgtagaaacggcttacgcttcagaaacgcaaaaagtcaccaaagagaaacctgcacatctggcgcaatccattcgcgttgcgaaacgttaatttgcgttaatattgtgtgccgggtgcgatgcatccggcacgtatcaacatcacaccatatccagcgcagtttttccttttggtgccggatacgctttatccagcataactaattccgctgacgaaagttcaacctcaagcacagccgcattttgttggacatgtgcgacagttgccgcttttgggatcgccatcacaccctgatggctgattacccacgccaacaatacttgtgccgcactgatattgtgagcatgtgcaatttcgttgactaccgcgttttttaacagtccattgcgcaaccgcccggcctgagctaatggactgtaagccatcaccggcatctgctgtttctggcaccagggaagtagatcgtactcaatccctcgtgaaccgagatggtaaagcacctgattagtggcacactgatttccccccggcagctgccagagttcctgcatatcggcataatcaaggttagaaacgccccagcggcggatttttccctgggcgatcaatttttccatcgctgcgacagtctcttcgagagcgaaactgccagaccagtgtaataagtagagatcgagataatcagtattgagacggcgtaaactggcttcgcatgcatttatcgctttttgcccgccagcattccacggatagactttagagacgagaaagacgttctcacgcagaccgattaatgcttccccaaccactttttcggcaccgccatcggcatacatttcggcggtatcaatgagggttaaaccgagttcaatgcccgcgcgtagtgcagcaacttctgttttacgctgactggcatcttcgcccatataccatgttccctgccctatggctggcagtgagacatcgccactaaattgaatcattttttgttgcattgcttcctcccaggtattgcaccaccgtaatgcaaaacagggcattacgccctgtttttatgcacaaaatgccctggaaaaatgcattatcagaatttgtaggtgatcccggtagaaatcaggccagtccaggatttatccaccattgggctgtcagtaacttcatcagacagacgggtgtagcgcgcgataccgtaaacactccagtcaccgaggaagttgtagctggcgctcagctccaggtaagggctccagctgtcgttcgggttatagccacgcagaccgctgcgagcggactctttgctcgatacgccataatagtattcgttctggttttcgctgttccactgcacaccaatacccggagtcacggtcaggccaccgttggtgtaacgatacaaccaggccatatcccagacgatgccgttgctgttatccagggtatcgccagccagggtggtacgcaggtaaccgtactgggtaaagtgagcataagacagaccagccatcatggtgctcttacggtcatccaggtgacgcatttggtgatcgccactgtctttagctttgaagtaaagcggcgaccagtaagcggtaattgaaagtttgtccgttgcgtcattccacaggtagtaaccaccacctaagccacggaaccagaagttatcgccttcatagttgattaccggtactgggtaaacatcggtatcgtaatctttatatgggtgttcaacgacacctacgcctgcgcccagggaaaatttaccttcagcgtgcgctacgcctgcagacgttgcgataagcactccaagtgccagaagtttgagtttggtcacaattaatcattccttaaacaaatgtttagcgggcgacaaagtttacccgtcaatacatcgaaacccaacctttttacgttttcattttttatagtaactgtttaattttcctgacgcagatgacaccacgcttacagccaaatgaatttagcgttaccggcgaccctattatttacattaattatgcaaaatttatggatgagttgttgatatgccattgaaattaagaaagccgtgcaggcaagttttccatttgccatctacgcttaattttgaaggtgtatcaccgggcacgttgttctcatcgtcaataaaatggcatgagagttgctgtgttttagcaagagacgtcgttcagtttacctcttccgggagcctcaactattcatatgaacggctcttaacctgtgctaaaaaacgaaaggacggcataccatgaatatattcgatcactatcgccagcgatatgaagctgccaaggacgaagagttcacactgcaggagtttcttaccacttgtcggcaagatcgcagtgcttatgccaacgcggctgagcggctattgatggctattggtgagcctgtcatggtcgatacagcccaggaacccagactttctcgactcttttctaaccgggtcattgcacgttatccggcgtttgaagagttttacggcatggaagacgcgattgaacagattgtctcttatctgaaacacgcggctcaggggctggaagagaagaaacaaatcctgtatctgctggggcctgtgggtgggggtaaatcatcgcttgctgagcgactgaaatcattaatgcagctcgtaccgatttatgtattgagcgccaacggtgagcgtagcccggtcaacgatcatcctttctgtcttttcaatccgcaggaagatgcgcagattctggaaaaagagtatggcattcctcgccgttatctcggcaccatcatgtcgccgtgggcggcaaaacgcctgcatgaatttggtggcgatatcactaagttccgggtagtgaaggtctggccgtcaattctgcaacaaattgctatcgccaaaacagaacccggcgatgagaacaaccaggacatctccgccctggtagggaaagtcgatattcgtaaactcgaacactacgcgcagaatgacccggacgcctacggctattccggtgcgctgtgccgcgccaatcaggggatcatggaatttgtcgagatgtttaaagcaccgataaaagtgctgcatcccttgttaaccgccacccaggaaggtaactacaacgggacggaaggtatctccgccctgccgttcaacgggattattctcgcccactcgaacgaatccgaatgggtcactttccgtaataacaaaaacaacgaagccttcctcgaccgtgtttacatcgtgaaggtgccgtattgcttgcgcatttccgaagagatcaaaatctacgagaaattgcttaatcacagtgaattgactcacgccccctgcgcccctggcacgctggaaacgctgtcacgtttttctattctttcgcgtctgaaagagccagaaaactccagcatttattcaaagatgcgggtttatgatggtgaaagtttgaaagacactgatcccaaagccaagtcgtatcaggaatatcgtgactacgccggtgtcgatgaagggatgaacggtctgtcgacgcgttttgcgtttaagatcctctcccgcgtgttcaacttcgatcatgtagaagtggcggcaaacccggtccatctgttctacgtcctggaacagcagatcgagcgcgagcagttcccgcaagagcaggcagaacgctatctggagttcctgaaaggttatctgatcccgaaatatgccgagtttatcggcaaagagatccagacggcctaccttgaatcctattcagaatatgggcagaacatttttgaccgttatgttacctacgcggatttctggattcaggatcaggagtatcgcgatccggataccgggcagttgtttgaccgcgagtctcttaacgccgagctggagaaaatcgagaaaccggcggggatcagtaatccaaaagatttccgcaacgagattgttaacttcgtactgcgagccagagcgaataacagcggacgtaatccgaactggagcagctatgaaaaactgcgcacggttatcgagaagaaaatgttctccaataccgaagagctgttgccggttatttcgtttaacgccaaaacgtcaaccgacgagcagaagaaacacgacgactttgtcgaccgtatgatggaaaaaggctacacccgtaaacaggtgcgtttactgtgcgaatggtatttgcgcgtacgtaaatcgtcttaacaaccctggcccggtacacatgctaccgggcctacagcgacagcgaaccgtgggccagagaagcggcaacacaggcgtagcataccgttggcaaatgtagtacggggggcatatgacctggtttattgaccggcgtctgaacggcaaaaataaaagcatggtgaatcgccagcgtttcttacgccgttataaagcgcaaattaaacagtcgatctccgaggccataaataagcgttcggtgactgacgtcgacagcggcgagtccgtatccattcccacggaagatattagcgaaccgatgtttcatcaggggcgtggaggcctgcgccaccgcgtgcatccgggcaatgaccatttcgtccagaacgaccgaattgagcgtccccagggtggtggcggaggttccggcagtggtcagggccaggccagccaggatggtgaaggtcaggatgaatttgtctttcagatttcgaaagatgagtatcttgatctgctctttgaagatttggccttaccgaatctgaaacaaaaccaacaacgccagctgaccgaatataaaacgcatcgggcgggttataccgctaacggcgttccggccaatatcagcgttgtacgttcattgcagaactcactggcgcggcgcacagccatgacggcgggcaagcggcgggaacttcatgcactggaagagaatttggccatcatcagcaacagtgaacctgcgcaactgctggaagaggaacggctgcgcaaagagattgctgaattgcgcgccaaaattgaacgcgttcctttcattgacactttcgatttacgttacaagaactacgaaaaacggcccgatccctccagccaggcagtgatgttttgcctgatggacgtttccggttcaatggatcagtccactaaagatatggctaaacgtttttatattctgctgtatctgttcctcagcagaacgtataagaacgtggaagtcgtatacatccgccatcatacccaggcgaaagaagtcgatgaacatgagtttttctactcgcaggaaactggcggcaccattgtttccagcgccctaaaactgatggatgaggtagtgaaagagcgttataacccggcacagtggaatatttacgcagcccaagcatcagacggcgataactgggccgatgactctccgctttgccatgaaattctggcgaaaaaaatattacccgttgttcgttattacagctatatcgaaattacacgtcgcgcgcatcagacactgtggcgagaatatgagcatctgcaatctactttcgacaactttgcgatgcagcatatccgcgaccaggatgatatttatccggtgttccgtgaactgtttcataaacaaaatgcaacagctaaagactaaaactgtcagccgggtcattatcgcctggctgatttttagctcactgtaaattatctcttttattacatacattagcttacaatcgctttaaatatgacagcataacctttacacaatttagttccagaaaacaatcattcggaaaaatgattcggtcaacacgtatttccctggggttattctttaattattttttatcgttaacgaaaattgatcctggtcaaaactatatatctctgccatcaataaaatccagcactcacattgctctcctttttatggcttctatgggtacacaaaaattaaaagctcaaggcttttttattttcagcttattgctgacgttaattttattttgcattactaccttatataacgaaaacacgaatgtaaaactcatcccacagatgaattacctgatggttgttgtggctttgtttttccttaacgccgtcattttccttttcatgttaatgaagtatttcactaacaaacaaattttaccaacactcattttaagccttgcatttttaagtggccttatctatttagttgaaaccattgtaattatccataaaccaatcaacggcagtacactgatccagacaaagtcgaatgatgtttctattttctatattttccgccaactcagtttcatttgtttaacctcgctggcgctcttttgttatgggaaagacaacatccttgacaacaataagaagaaaactggcattctgttgctggcgctgattccttttttagtttttccccttctggcacacaatctgagcagttataacgctgactattctttgtatgtcgtcgattactgtccggacaaccatactgcgacctggggaatcaactatacaaaaatattggtttgtttgtgggcatttttactgttctttattatcatgcgtacacgattagccagcgaactatggccgttaatagcattattatgtctggcatcgctatgctgcaacttacttctactgactctggatgagtataattacaccatctggtatatcagtcgcgggattgaagtttccagtaaactgtttgttgtgtcttttctgatttataacatttttcaggaactgcaactctccagcaaactggcagttcatgatgtactgaccaatatttataatcggcgctactttttcaacagcgtagagtcattattgtcgcgacctgttgttaaggacttttgtgtcatgctggttgatattaatcagttcaaacgcatcaatgcccaatggggacatcgtgtgggtgataaagtgctggtatcaattgtcgatattatccagcaaagcatccgccccgatgatattttagcgcgactggagggtgaggtgtttggcttgctatttaccgaactcaatagtgcccaggcaaaaatcattgcggaacgtatgcgtaaaaatgtcgaactcctgaccggctttagtaacagatatgatgttcctgaacaaatgaccatcagtattggcacggttttttcaacgggtgacacgcataatatctcgcttgtcatgacggaagcagataaagccttacgcgaagcgaaaagcgaggggggcaacaaagtgattattcatcatatttaagtgcaaaaatattcagagccatgctttttgcgtggcttttgcatacaatttattactattacccctaaatttcccctccccagcggcgcagagatgagtataattagcgcccctgtgccaggccgcaatcgaactttatctggttttctcgtttcactaaccgaaggagtgccatttatcatgaaattgcaccatagaatgctccggcattttatcgccgcaagtgtcattgtgctgacatcttccttccttatttttgaacttgtcgccagcgacagagcaatgagtgcctatctgcgctatatcgtgcagagagcagactcttcctttctttatgataagtatcagaatcagagtattgccgcgcatgtgatgcgcgctctcgctgctgagcagtcggaagtgccgccagaacagcggcgcgccatctgcgaggcttttgagtctgccaataatacccatggcttaaacctgactgcccataaatacccgggcttacgcggcacactacaaaccgcatccactgactgcgacacaattgtggaagctgcagcactattacccgcttttgatcaggcagtggaaggcaaccgccaccaggatgattacggttcaggtcttgggatggccgaagagaaatttcactattatctcgatctcaatgaccgctatgtctatttttatgagccggttaatgttgaatactttgcgatgaataactggtccttcctgcagtcaggaagtattggtatcgatcgcaaagatattgaaaaagtatttaccgggcgtaccgtattatcgagcatttaccaggatcagcgtactaaacagaacgtgatgagtttgctgacgccggtatatgtcgcagggcagctaaaagggattgtgctgctggatattaacaaaaacaatctgcggaatatcttttacactcatgaccgccctctcctctggcgttttctcaatgtcacgctaaccgatacagattcggggcgcgacattatcatcaaccagagcgaagataatctgttccagtatgtcagttacgtccatgacttaccgggcggcattcgtgtctcgttatccattgatattctttactttatcacgtcttcgtggaaaagcgttctgttctggattttgacggcgttaattttgctgaatatggtgcggatgcacttccgcttataccaaaatgtgtcgcgagaaaatattagtgatgcgatgactggactctataatcgcaaaattttaacccctgaactggagcagcggttgcagaaactggtgcaatccggttcttcggtgatgtttattgctattgacatggacaagttaaagcaaataaatgacaccctcggtcatcaggagggggatttagcgattacgttattagctcaggcgattaaacaatcgattcgtaaaagtgattatgccatccgactcggtggcgatgaattctgcatcattcttgtcgattcgacgccgcaaattgcagcacaactgcctgaacgtatcgaaaaacgtctgcaacatatcgcgccgcagaaagaaatcggcttctcttccggtatttacgcgatgaaagaaaacgatacgttacatgatgcgtataaagcttccgatgagcgtttatatgtcaataagcagaacaaaaacagccgttcatgataaccttctgtagttgtttgcttgtaatctcaggagcatgaaatgactgaaatggctaaagaaagcgtgacgcatcagcggttaatcgctttattatcacaagaaggtgctaacttccgcgtcgttacccatgaagcggtaggtaaatgtgaagcggtgtcagaaattcgtggcaccgctttaggccagggggctaaggcactggtatgtaaagtcaaaggcaatggcgtaaatcaacatgttctggcgatcctcgctgccgatcaacaggccgatctgagccaactcgccagccatataggcggattacgcgcttcgttggccagcccggcggaagtcgatgaactcacaggctgtgtcttcggcgcgatcccccctttcagcttccatccaaaactcaaactggttgccgaccccctactcttcgaacgatttgatgaaatcgccttcaatgcaggcatgctggataaatccgttattttgaaaaccgcggattatttgcgtattgcgcaaccagaactggtcaatttccgccgcactgcgtaactagcctgtccgttcaataagcagaacggacaaaaccagcacagcagcaatggcaaaaaacgatgacgtgataatcagtgtctcgacgaacatttgatcgttcatagtatgcccccgggagatagctgttttcacgttattgttagcgtgcacaaatggcagtttgatgacagttcgcctgattttttatgcagaaaacgtaaagattttctacttcctgcctgcagcaagcgtaaagtaagcaggcttattattttttggcaaggaaaccacgatgtttgatgtcactttgctgatcctgctcgggttagctgcgctgggctttatcagtcataacaccactgtcgccgtttcaattctggtgttaatcattgtccgcgtcacaccgttaagcacctttttcccgtggattgaaaaacaggggctaagtatcgggataatcattctgacgattggcgttatggcccccatcgccagcgggacgctaccgccctcaaccctgattcactcgtttctgaactggaaatcgctggtggcaattgcagtcggcgttattgtctcctggctgggtgggcgcggcgtgacgttaatgggcagccagccgcaactggtcgccgggctgctggtaggtactgttttaggcgtggcgctgtttcgcggcgtaccggtcggcccgcttattgccgcgggtctggtttcgctgattgtggggaaacagtagttaatcccgcaatatatcggcctggcgtttgtcccaggcctttcttaaacattgtaataaaggccgttgttgaatcataccccagcgtatgagcaactttctgtacagtatcgcctttcactaatccctgaagcgccataatcagctgtaactgctgacgccactggcgaaaactcaaccccgtctctttcactatcagccgggcaagattgcgttcactcatcgcaaaaaagccagcccattgccccaatgagccccactcgacgggctctttcgccatcatctccaccattgtgcggattttaggatgagaagaaacgggcaggtgcagctgttgttgtggctgctgagggagttcatcaaacaggacctgaattaatctgcgggtcatcggctcagcacgctgagtcgtcgtcctgtttgccagggttaaaattaattcccggcataagggcgatattttcaatgtgcaacatgttgtcggcattgtcactgcgctgggctcgataaacagaaaacagagttcagcgttagctgtcacttgattgctatgtttcaccccgcccggtatccaaaccgcatattgtggcggcaccatccacaaagcattttccaccgtacaggtaattgcaccatgtagtgccagtatcaactgccctttgcggtgctgatgtacaggactggttaactcatccgttccggcgtgaatacaaaatgcgaccgcggcttcatggtgtcggtcgggttcatagccattgagattcaacctgtgcatcattttgtccgaatttagcgatattttgtcattttagcttgattcaacataacaataaaaacggtaaggtacagcctcgtttgtaacaatgagaagcatatgacctgttcaacttcattaagcggcaaaaacaggattgtccttatcgctggcattctgatgattgccacaacattacgcgtcacctttaccggcgcagcaccgttactggatacgattcgttccgcttactcgctaacgacggcgcaaaccggcttattgaccaccctgccattattagcctttgcgctgatctcaccgctggccgccccggtggcgcgacgttttggtgtggaacgtagcctgtttgccgcgttacttttgatctgtgcaggtatcgcaattcgctctctcccttcgccttacttattatttggcggtacagcggtcattggcggtgggattgcattaggcaatgtcttactgccaggattaattaaacgcgatttccctcattccgtcgccagacttaccggcgcatattccctgacaatgggagctgcggcggcactgggatcggcgatggtagtgccgctggctttgaacggttttggctggcaaggcgcgttgctcatgctgatgtgttttcctctgctggctctttttttatggctgccacagtggcgaagtcaacaacatgcaaatttgagtacctcacgcgccttacatactcggggtatcttgcgttcgccgcttgcctggcaggtaacattgtttcttgggatcaactcactggtctattacgtgattattggctggcttccggcgattctcatcagtcacggctatagcgaagcacaggcgggttcactgcatggtttgctgcaactagccacagcagctcccggtttgctgatcccacttttcttacatcatatgaaagatcagcgtggtattgcagcgttcgttgccttgatgtgcgcagtgggcgcggttgggctctgctttatgccagcacacgcgatcacctggactctgcttttcggttttggttccggcgcaacaatgatactggggttgacgttcattggtctgcgggcaagttctgcgcatcaggcggcggcactctcggggatggcacaatccgtcgggtatttgctggcagcctgtgggccgccgctgatgggtaaaatacacgatgctaacggtgactggtccgtaccactgctgggtgttgcaatactttcactactgatggcgattttcggactttgcgccgggagagacaaagaaattcgctaatatccggtgctatagtgacgtgacaaatcatgcgtgaaagggagaacaaatacgatgaatattcagtgcaaacgcgtttatgatccggctgaacagagcgatggttatcgcgtactggtcgaccgcctctggccacgcggtatcaaaaaaaccgatttagcccttgatgaatgggataaagaaatcacgccgtcaacggagctgcgcaaagcctttcacggcgaagtcgtcgattttgcaacctttcgcgagcaatatcttgcagaactggcgcaacacgagcaagaaggaaagcggctggcagacatcgccaaaaaacagccgctgaccctgctctactcagcaaaaaacaccacgcagaaccatgcgctggtgctggcagactggctacgtagcttgtgattttagtacagcatccggcggttatttttcaccagccggatggtcccgtcgccacaatgcccattcatcaatcgtttcaccgcccggtaatttgcaattgttgctgaccccttgcgctgtctgcacaggaatgagcgtcccgcccttctgctggcaatagaccgacgccggatttgccataccaatctgcggcggtttaggtgcttctggctgagaaggggttgaacaaccagccaggaccagcaagcaaggcagaacaaaactgataattttcatttattgatctcacatatttatccaggcttagagtatcgctgtatcgttttgttttgcagcactatttttattacattcactcaaaacatattacgccttgtttcatctttgttgatgatgttttatcatgcctgcaaagattaaattatcagcatttacccgccgtatcctggagttgtttcgtgtcagatcagattatcgcccgcgtctcgcaatcccttgccaaagaacagtcactggaaagtctggttcgacagcttctggagatgctggaaatggtcactgatatggagtcaacctacctgaccaaagtggatgtcgaagcgcgcctgcagcatataatgtttgcccgtaatagccagaaaatgcacatcccggagaattttaccgtctcgtgggattactcgttatgcaaacgcgccattgatgaaaactgctttttcagcgatgaagtccctgaccgttggggcgactgtattgcggcacgcaatcttggcatcaccacatttctgagcacgccaattcacttaccggatggatcattctatggcacgctttgcgccgccagcagtgagaagcgccagtggagtgaacgcgcggaacaggtcttacagttattcgccggactgattgcacaatatattcaaaaagaggcactggttgaacagctgcgcgaagctaatgctgcgctgattgcgcaatcgtataccgactcgttaaccgggctaccgaatcggcgggcgatttttgaaaatctgacgacgctgttttctctcgcccggcatcttaaccataagataatgatcgcgtttatcgatctggataacttcaaattaatcaatgatcgttttggtcataatagtggcgatctgtttctcattcaggttggcgagcgccttaatacgctccagcaaaatggcgaagttattggtcgtctcggcggtgatgagtttttggttgtttcactgaacaacgagaatgcggatatttcgtcgctgcgagaacgtattcaacaacaaatacgcggagaatatcacttaggtgatgttgatttgtattatcctggtgccagtcttggcatagtagaagtcgatcctgaaacgaccgatgcagacagtgccctgcatgctgccgatatcgcgatgtatcaggagaaaaaacataaacagaaaacaccttttgtcacgcattcagcgctacattcctgaggcgtattcacatccttttgattggtgataacatgcgaatcggtattatttttccggttgtaatctttattacagcggtcgtatttttagcatggttttttattggcggctatgctgccccgggagcataaagatgaaaaaaacaacgattattatgatgggtgtggcgattattgtcgtactcggcactgagctgggatggtggtaacgtcacatctaaaaaaatagcaaaggctgcctgtgtgcagcctttgtgcaatttacgcgttaacttttaatcttcctgtagataaatagcacaacaatcgcaccaataacggcaaccacgaagctgccaaaattgaagccatcgactttaccaaagccaaacagcgtgctgatccatccgccgactacggcaccgactatccccagcaggatagtcataaagaatccaccaccatctttacctggcatgatccacttcgccagaataccggcaataagcccaaaaataatccatgacagaatgcccattgtttcctcacttatctgttttgcattagcgggttagtcgctgataaaaagcatagcacaacatcgggagggtaagatttgtgacgagcatcacggaggaattttttgcgatggcgcagaaattgcgccatcaacgatcagtgataattaccaaccacaaacatcatgttcgttttccgtgtcataagaacgcacggtattcaccagatcttttatcacttcagccgccacttctggcaccagcaaagtcatcggcgtctctgtttcataatcgacagaaacgccattgctgttattggtgacggtcacggtatacgttgctttgcccatgattcatttcccgttatgaatgactttccgttgttgcgtgccttccatcaggacttcaggagcaacgaagaagtcaatgttgaaataagtatcgtcagtcatggcttcaatgttgtgccacttttctggagggaacaccgcaaactgccccgcttcgataaggatcacctgatcaggctctgcactgtgttcatcagcgtagccgagatatttgaccgccccatgcataacggaaaggcgtgggtaaacccccgggcgcgttcctttatcaagatgacgttcgaatattccggcaggcgcagtttgtttattccagaaaggcgttgagcgcgtatgaatataattctgtgggatttgcagcatccttttccctccttcggtgaatgcgctgaaaacggtttattccagccgtttcagggtacgcctgataatttgcattttaaataccatttattggttactttttagcaccggatcagagaagaatcagggaggattacaggtgggaagcccgcggcaacgcgggctgaaagcatcaggattgcagcgtcgccagtcgggcggcgaaacccacgaacatcaaaccaatcagtgagttgcccactttagccagtttctttttggtacgtatgtactgcgtgacaaaagccccagaaataatcaggaagctcaaatagcagaaactcaccagttccagcgtcgtcgccagaataaagaatgaaattcccgtatgtggggcattaacatcgataaactgtacgaaaaacgacacatagaacaaaatggctttcggattagtcaggctcaaaattaacgcgcgtttaaaaatggcaccgtattggggctcatcggatttggtctcgctatttttacctttcagggtcgcgtagagaattttactccccagatagagcaaataaaacgcaccaagataacgtacgatgttgaataatatcggggtggtcttaattaatgtcgccactccagcccatgccagaaacatcaataccgcatcgccaataaatacaccacaggccgcaagataaccgcctttcataccgctactgacgctatttttgagtacaaacagggtatttggccctggcaccaacacaataaaaatggccccaaccagataggtccagtaattcagaaccccgtattcagcgaacacattaacctctttaattatctttcgatcatgcgcgattaaaggtgaatatgctaaccaatctgtagcggcttagaaaggagaaaatcaggttttaacccgatatcaacccgataattgaatcattaatcaggcctgctccagtgaaaaattcgggtagtgctcggcaaaatactggcgtaaaaattctaccgttatccgcactttcgctgacgtcgacagctttgaaacataaacggcccagacattcgctggctggtaatattccggtagcacttgtactaaatgaccactggcgggaaacagcctggcgacatcgatttttacgtggtccggaaaaacaccgaaggcgaatattcctcgccaggcggtagagtaaatgaaggaacagagaatgaagtcgtcattcaggaatcggtatttactcgtcgtggtgtcgagcgcattttgcgttaagctcaaataagttcatttgaaccgcctgctgttggatttgtagtttgccgaagccggactgagcgcgcccagtccggcttcggaagattttactgtggatattcctgcaataaattgtgtaatgcttccgccatcagctcaccacgccagccggaaatcagctccggcaaattgttctgcggtttcagtttccagtgccagttcagcaattggttgatttgccgacgcgatgccagcaattcggcgctgatcttgtgcgtttcgctgacgtcagtaatcagcgacttaatcgctttaaacgctttacgataacccggcatgtccatcaggttaagcatcggctgcggtaaggcctcttccggcaatgcctgcgctttttccaccagcgccagcaacgttttaccgtggaagcggatttcgctaccggataagcccaggctgtccagttcgcccagacttcccggcatataacgcgctaccgaccacaaatgctcttcacgcacgacaaagttcaccgccagatcgcgctctcgcgccttgcgcaatcgccagtcggctaacagttgcagacaggccagttggcgtgtgcgtaattgccaggcattggtgatatcacgccaggcgtcttccggcgcaacgacttcctgacgacgcatttgcatcaggcggcattcatccagcgccgcaggtagccagccggaggcctccgtttctaccataagctttgcggtgatcggtaacagataccagacatccgccgctgcgtattcacactgacgttcggtcagcggtctggccagccagtcggtgcgcgattcactcttgtccagcgtaacgccggaatactcttccaccatggaagcgaaaccccatgacatcgggcgtccgcagaaggcagcaaggatttgcgtgtcaatcaagggttgtggtaattcgccaaagacattgaggaacacttccagatcttcactgcctgcatgaagaaattttgtgatggacggatcgcgcaggatcgctttcagcggtgaccagtcggtgatcccgagaggatcaattagcgccagatgctcaccatcaaaaagttgaattaaacccagctgcgggtaataagtgcgcgtacgaacaaattcagtatccagggctatcgccggaaaggcacggacggcttcacacaaagaagccagcgcatcgtccgtggtaatcatttggtaattcaaattgtattctctttagtgggcgtcaaaaaaaacgccggattaaccggcgtctgacgactgacttaacgctcaggctttattgtccactttgccgcgcgcttcgtcacgtaattctcgtcgcaaaatttttccgacgttagatttcggtaactcatcacgaaactccaccagcttcggtactttgtagcccgtgagctgacggcggcaaaaggtcaccagtgactcttcggtaagcgatggatcttttttcactacgaagattttcaccgcttcaccactggagccggaaggtacgccaacagccgcgacttcctgtacgccaggatgctgcatgacgacatcttcaatctcgttgggataaacgttaaaaccggaaaccagaatcatgtcttttttacgatcgacaatgcgcaggaatccttcttcatccatcaccgcgatgtcgccggtgtgtaaccagccatttttgatgatttcatcggtagcatccggacgctgccagtaacccagcatcacctgcggtcctttgacacaaagctcacctggttgaccaggtggtacttcattatcatcatcatccaccagtttggcttccgtcgacggcaccggtaaaccgatgctaccactatgataatcaatatcatacgggttaacgctgaccagcggcgcgcactcggtcaggccataaccttccagcagatactgtccagtcagtttaacccaacgttctgcaaccacttgctgaacaggcatcccaccgcctgcggaaagatgcagactggagaaatccagctgctggaactctttattgttcagcaacgcattgaacaaggtgttaacgccagtgatagcggtaaacggatatttcgctaactcttttaccagccctggaatatcgcgcgggttagtgataagcaggttctgcccccccagttcgataaacagcaggcagttaatggtcagtgcaaaaatgtgatacagcggcagcgccgtcaccaccagctctttgcccggatgcaacagcggaccataggtcgcgttaacctgttccaggttcgccagcatattgcggtgagtcagcatcgcgcctttcgccacaccagtggtgccgccggtgtattgcaggaaagctaaatcttccggcaccagttctggtttgacgtactgcatccggtagccgttgtgcagggcgctacgaaatgaaatggcatctggcagatggtatttcggcaccagacgcttgatgtatttaacaacgaaattgactaccgtgccttttgccgtagatagctgatcgcccatacgggtcagaataacgtgctgaacggcggttttatcaaccactttttccagagtgtgggcaaagttagacacgataacaatcgccgatgcgccgctatcgttaagctgatgctcaagctcacgcggggtatacaacgggttaacgtttacgacgatcatcccggcacgcaaaatgccaaacagcgccaccggatattgcaataagttaggcatcatcaacgcaacgcgatcgcctttcttcagccccaacccttgttgcaaataagcggcaaacgcgcgactgcgttcttccagtttgcggaaggtcatcacctcccccatattcacaaacgcgggttgatcggcgtagcgcgcgaccgactgctcaaacatatctaccagagattgataacggtcagggttgatctccgtcggaacgtccgcgggataacggttaagccaaaccttcttcaattcttcacctctaaaatgcgcgttcgtcgtcatcgcaaccccaagtgataaacatactgttaacataatattaactcatcttaccagcttgataattacccaaggaaaaggttgcgaagcgcgtcactatttatttttatctttaccgtaagaatgcagaaacagcggaccggccgctgtttctttttctttaaaaacaagcaattattcagttacaactgtttgtactctcgcggggccgggattataccagccccatccgccgtagccatagggccagccacgaccgccataaaaccatggatcaatcggctgaggcggcataatcacctgctgggttaaatgccaacgtttgtaacccgttacttgcatcaccataaatttatagggcgtattaccgattttgccgtcaaccgcaccggtgattggcccgactaccgtcaccagttgtccgcggaaatccaccgggtccagaaaaccgttcacatcggcataaatgcgaccgcgagaaggttctcccagcgtcggtctggctccgctgtccagtggtacggtggcaatttccaggcgtgttttcccttgctggttttgtaccgcaaccactttgccgccaaagcgagcctcctgaccaacgtacagctgcggcgcactcatcacccgaactaaatcttgttgcggcgtgggactgctgcctttaatggcgtctggcacagtaacacaaccgctcagcattagcgcaaacgtacctgccagtatgcctttgataacattcttttgaaccgccatgatgcgactcctttttttctcagggcatactcttaagattcattctttgcccggaagtttcttccatgcgacgttgttacgtaaataaactggttcagcatgttccaccgccaccgttttaccctcggcaaacatctggcacgcaatcggcagcatatcttctgcagcgggcagtaacacttcgccatcgagcaaaaccagcccgctctctttaccgagatccggccaggcttgccagcccgtccctactgtcacccattcgccggaaagctgttgcattcgttcatgaacgagttcgggtttgagtacggcttcggtttcttcaccgtgccagataccgttttcatcacgctgatattcggcccagtaaacttcgcccattcgcgcgtcaatagctgccagcacgcgggttgcgccgtttttgcgccacgccccttgcgccatcgtcattagcgtggagacgccaatcatcggcagctctgcgccaagtgccagcccttgcgcaatgccaataccaatgcgcacgccggtgaagctaccggggccgcgcccgtaagccagagcgtttatgtcagtcagggaagttccgctggtggtcaggatatcctgcaccatcggtaagattcgttgagtatgttcacgagggcaaagctcaaaatgagcgttgacagtaccgtcgttccacagggcgacagagcaggcctctgtcgcggtatcgatagccagaattcgcatgggtcttcgtgcttagatcaataaaaaggcgcgcatcataccatactccgtaacaaattacctggaggatggtatcgcaaggaaacgaaccgcacgggcaatgtcacgggtgcgcggcgctggcggcagactggcgagaaacgtcgcgccgtaagggcgcatcaccagccgattatcgcaaatcaccagcacgccgcgatcgtcggcgtcgcgaatcaatcgccctaccccctgcttgagagtaatgaccgcatccggcagttgtacttcatcgaacggatcaccaccgcgcaaacggcaatcttccatgcgtgcttttaatagtggatcatccggcgaggtaaacggcaatttgtcgataatcaccaatgacaatgtatcgccacgcacgtccaccccttcccagaaactgctggttgccacaagaagcgcgttaccggcgctgacaaattgctgcaacagttgccctttgctggtttccccctgcaacaaaacgggaagcgtcatggtagcgcggaactgctcggccagatcgcgcatcatggcgtgcgaggtacaaagcataaaacaacgaccgttgttagcttcgatgatcggtcgcagcattgccgccagttgccgtgcggaacccggttgattggtttgcggcaggttgcgcggcacacagagtaacgcctggcggctgtaatcgaaggggctgggtaacagcaacgactctgcctgttcaatgccaagccgcgaggtgaaatgatgcagatcgtcgttcaccgacagcgttgctgaggtaaagatccagctaccgggtttttgcgccattaactctttgaatttatccgccacgctgagcggcgtgagagccagagtaaaatggcgcgaagtgcattcgtaccagtagctgtaacccggctgattaatctcttttagccgtttgagtcgcgtgcgatataacgtggcgcgttcaaatgccgcatccagcaaggcggaacgccccagcgaaagtttcgccacgtcataacaaagttccagggtgtcatcgagcagtaaaaatgcccgctgaatttgcggattagctaacagctcacgcaggttaccgcgataacctggctcaccgagttgcaggcgaaaatcctgcgcactctgggcaagacggtccgcgcacttttgtaactgctgggtgtcttttaattcggtgcggtaggcgatggtgatgtcttttgccaggtcgagcagttgtcgactggagagtgactgaccaaaatactggctggcaatgtcgggcagctggtgggcttcgtcgaagatcatgacgtccgcttccgggatcaattcgccaaaaccgctctctttcaccaccatatccgccagaaacagatgatgattcaccaccaccacatcggcgtccatcgcttttttgcgtgctttgaccacaaagcaatctttatacatcgggcagtcactgccgaggcagttatcgttggtgctggtgaccagcggccacgcctgtgaatcttccgccacgctgacgcaggtgctgatatcgccatcgactgtttgattagaccaggagcgcagcaggatcacatcgcttaagatttgtaccggcagatcgccccccgccagcgcctgctgttcgagacgttcgaggcagaggtagtttgagcgccctttcagcagcgccacattgcccgtgtatttcaatgcctttgagaccgttggcaaatcgcggctgtagagctgatcctgcaacgcttttgagccggtcgagattatgactttctttttcgcccgcagcgcaggggccaggtaagcgtaggttttgcccgtaccggttcctgcttccaccaccagcggctggcctttttctatcgcctgggtgacggctaccgccatctgtcgctgtggctctcgcggcttaaagccgggtatcgctttcgctaactgaccgtctggtgcaaaatcgtccgtcacactaccccctgttgatttgaacagggattatgtcaggatgagggcgctttcgccagttgaagtggtgacggcgacttcacattgtggcagtctttgcagcacgaaaatggaagtataatgaggacaaaatgatgactatcgttcgtatcgatgccgaagcccgctggtctgatgtggtaatccacaacaacacgctctactacactggtgtaccggaaaacctcgacgccgatgcctttgagcaaaccgccaacacgctggcgcagattgacgccgtgctggaaaaacagggcagcaataaatcgagcattctggatgccaccattttcctggccgataaaaacgacttcgcggcgatgaataaagcgtgggatgcctgggttgtcgcgggtcatgcgccggtgcgctgcacggtacaagcaggtttgatgaacccgaagtataaagttgaaattaagattgtggctgcggtgtaagctttatcgaagcaaaataagtcagacgataatttatcgacaatactggtcggttttgcataaatcgaccagagattaagatattacagttgatgctcctgctaattcattatttatttttataatttcaattttatctataaaactaactatataaataaacataatcatgccgttatgttcgcccttcgattagcatctctggttttctttcttacctgaacaatctggttatagcgtgaggactgaccattaattttctccatcttactggataacacaccatgagctgctacctttaaaacacctgaatgtcaacaggttaactcgtgccatatcgttataatccctttgatattagatgcaaattaaggtcatatatagccttatcgataacatggttaattttaaggataagaatatgcctgctgtaatagataaagccctggatttcattggtgccatggatgtatcagcaccaacaccaagttcgatgaatgaaagtacggcgaagggaatctttaaatatttaaaagaactgggagtacccgcgagtgccgctgatattacgacgcgagctgacctggaaggctggaacccggggttcacggaaaaaatggttggatgggcaaaaaaaatggagtctggtgaacgcattgtgattaaaaatcctgaatacttttcaacatatatgcaggaagaactaaaagcactggtctaagttaaatttacatcagcataaatgggtcaggacgcttttaatcacatatgaaaagcgtcctttttctcacaatcaaataaccatcggcttctataacgaaagcgatacggataagtgtgttactcgtcttcatcctcaaaacgcgccacgattcgctcgccggaatggttggcacgcagctcttctgccaccagcgcgattgcctggccgctgctcatcccttgagccatcagttcctggatccgctcgacggctttttgctgctgttcatgggtgagtgaaggtaaacctgcaaacattgttaactcctgctaaattgttggcgctaattatttcatgctacccggcacatagccagtagagtcaggactgatgaagacgttatctcccgctgtgattactttaccctggcgtcaggacgccgctgaattttatttctcccgcttaagccacctgccgtgggcgatgcttttacactccggctatgccgatcatccatatagccgctttgatattgtggtcgccgagccgatttgcactttaaccactttcggtaaagaaaccgttgttagtgaaagcgaaaaacgcacaacgaccactgatgacccgctacaggtgctccagcaggtgctggatcgcgcagacattcgcccagcgcataacgaagatttgccatttcagggcggcgcgctggggttgtttggctacgatctgggccgccgttttgagtcactgccagaaattgcacagcaagatatcgttctgccggatatggctgtgggtatctacgactgggcgctggttgttgaccaccagcgtcaaacagtttctttgctgagtcataatgatgtcaatgctcgtcgggcctggctggaaagccagcaattctcgccgcaggaagatttcacgctcacttccgactggcaatccaatatgacccgcgagcagtacggcgaaaaatttcgccaggtacaggaatatctgcacagcggtgattgctatcaggtgaatctcgcccagcgttttcatgcgacctattctggcgatgaatggcaggcattccttcagcttaatcaggccaaccgcgcgccatttagcgcttttttacgtcttgaacagagtgcaattttaagcctttcgccagagcggtttattctttgtgataatagtgaaatccagacccgcccgattaaaggcacgctaccacgcctgcccgatcctcaggaagatagcaaacaagcagaaaaactggcgaactcagcgaaagatcgtgccgaaaatctgatgattgtcgatttaatgcgtaatgatatcggtcgtgttgccgtagcaggttcggtaaaagtaccagagctgttcgtggtggaacccttccctgccgtgcatcatctggtcagcaccataacggcgcaactaccagaacagttacacgccagcgatctgctgcgcgcggcttttcctggtggctcaataaccggggctccgaaagtacgggctatggaaattatcgacgaactggaaccgcagcgacgcaatgcctggtgcggcagcattggctatttgagcttttgcggcaacatggacaccagcattactatccgcacgctgactgccattaacggacaaatttactgctctgcggggggtggaattgtcgccgatagccaggaagaagcggaatatcaggaaacttttgataaagttaataagatattacgccaactggagaagtaagacgtggaataccgtagcctgacgcttgatgattttttatcgcgctttcaacttttgcgcccgcaaattaaccgggaaaccctaaatcatcgtcaggctgccgtgttaatccccatcgtccgtcgaccgcaaccggggttgttgctgactcagcgttcgattcatctgcgtaaacacgccggacaagtggcattccctggaggtgcagtcgatgacacggacacatccgttatcgccgccgcgctgcgcgaagctgaagaagaggtcgctataccgccttctgccgttgaagttattggcgtgctgccgcccgtcgatagcgtaactggctaccaggtaaccccggtggtcggcattatcccgcccgatctgccgtatcgcgccagtgaagatgaagtctcggcggtctttgaaatgccgctcgcccaggcattacatctgggtcgttatcaccctttagatatctaccgccgtggcgattcacatcgggtatggctgtcctggtacgaacagtattttgtatggggaatgaccgcaggcataattcgtgagctggcgctgcaaattggtgtgaaaccctgactatacttatctttacatctacaaaacactacttgagacaatcatcgcaatattagttaaatcgcggtttttgattagtttaattcatgtgaatagttaagcctgtcgccgcgttccctcttacactatgcgctgttattagttcgttactggaagtccagtcaccttgtcaggagtattatcgtgattagtctattcgacatgtttaaggtggggattggtccctcatcttcccataccgtagggcctatgaaggcgggtaaacagttcgtcgatgatctggtcgaaaaaggcttactggatagcgttactcgcgttgccgtggacgtttatggttcactgtcgctgacgggtaaaggccaccacaccgatatcgccattattatgggtcttgcaggtaacgaacctgccaccgtggatatcgacagtattcccggttttattcgcgacgtagaagagcgcgaacgtctgctgctggcacagggacggcatgaagtggatttcccgcgcgacaacgggatgcgttttcataacggtaacctgccgctgcatgaaaacggtatgcaaatccacgcctataacggcgatgaagtcgtctacagcaaaacttattattccatcggcggcggttttatcgtcgatgaagaacactttggtcaggatgctgccaacgaagtgagcgtgccgtatccgttcaaatctgccaccgaactgctcgcgtactgtaatgaaaccggcttttcgctgtctggtctcgctatgcaaaacgaactggcgctgcacagcaagaaagagatcgacgagtatttcgcgcatgtctggcaaaccatgcaggcatgtatcgatcgcgggatgaataccgaaggcgtactgccaggcccgttgcgcgtgccacgtcgtgcgtcggccctgcgccggatgctggtttccagcgataaactgtctaacgatccgatgaatgtcattgactgggtaaacatgtttgcgctggcagttaacgaagaaaacgccgccggtggccgtgtggtaactgcgccaactaacggtgcctgcggtatcgttccggcagtgctggcttactatgaccactttattgaatcagttagcccggacatctatacccgttactttatggcagcgggcgcgattggtgcactgtataaaatgaacgcgtctatttccggtgcggaagtcggttgccagggcgaagtaggtgttgcctgttcaatggctgctgcgggccttgccgagctgttgggcggtagcccggaacaggtttgtgtggcagcggaaattggcatggagcacaacctcggtctgacctgcgaccccgttgcagggcaagttcaggtgccgtgcattgaacgtaatgccattgcctctgtgaaggcgattaacgccgcacggatggctctgcgccgcaccagtgcaccgcgcgtctcgctggataaggtcatcgaaacgatgtacgaaaccggtaaggacatgaacgctaaataccgcgaaacctcacgcggtggtctggcaatcaaagtccagtgtgactaatacttcttactcgcccatctgcaacggatgggcgaatttattcccgctttctcgtctgctgtaattttccccactacacttccactgttgcgtcaggcgtttgtcgccatacgcttacagggtggcccgcatgcaaaaagcacaacggatcattaaaacctatcgccgtaatcgaatgattgtttgtacgatttgcgcactcgttacgctcgcttcgaccctgagcgtgcgatttatttcacagcgtaacttaaatcaacaacgggtagtacaattcgccaatcacgctgtagaggaattagataaagtactgcttcccctacaggcaggtagcgaagtcttgcttccgctgattggtctgccctgctctgtcacccatttgccattacgtaaacaggctgcaaaactccaaactgtgcgatccattggcctggtgcaagacggcacactttattgctccagcatttttggttatcgcaatgtgcccgtcgtggacattctggctgaacttcctgcaccgcaaccacttttacgactgacgaccgaccgtgccctgataaaaggcagtccggttttgattcaatggacgcctgcagcgggcagtagcaatgctggggtcatggagatgattaacatcgacttactgacggcaatgctccttgaaccacaactgccgcaaatcagtagcgccagcctgacggtggacagtcggcatttgctctatggtaatgggctggtagattcccttccgcaacctgaaaataatgaaaactatcaggtttcttcgcaacgctttccttttaccattaacgttaatggcccgggggctacggcgctggcatggcactatcttccaacacaattaccgctggcggtactgctaagtttactggtgggctacatcgcctggctggcgaccgcttaccgaatgagcttttcccgcgagatcaatctgggcctggcgcaacatgagttcgaattgttctgtcagcctttgcttaatgcgcgcagccagcaatgtattggtgtagagattttgctgcgctggaacaatccgcgtcagggctggatttcaccggatgtgtttattcctatcgcggaagaacatcatttaattgtgccactaacccgctatgtgatggcagaaaccattcgtcagcgccatgttttcccaatgagtagtcagtttcatgttggcattaacgtcgcacccagtcattttcgccgtggtgtgctgataaaagatctcaatcagtactggtttagcgctcacccgattcagcaactgatcctcgaaatcaccgaacgcgatgccttactggatgttgattatcggattgcccgcgagctgcatcgtaaaaacgtcaaactggcgattgatgacttcggcaccggcaacagttcgttttcctggcttgaaacattacgtcctgacgtgctgaaaattgataagtcatttaccgcagctataggttctgacgcggttaactcgacggtgaccgatatcatcatcgcactggcgcaaagactgaatattgaactggtggcggagggcgtagaaacgcaagaacaggcgaagtatttgcgcagtcatggcgtgcatattttgcaagggtatttgtacgcacagccgatgccgctacgtgattttcccaaatggctggcgggcagccaaccgccgcccgcccggcataatggacatatcacccccattatgccgttacgttaacgcttactcatcttcatcgtgcgccggttgctctttaacaatgcgaaccagatcaacacgataatcattggcttcaatgatggtgatatgcagtggccctacatcaatcacatcgcccacacggggaatgtgaccatttgccgaaatcacgaggcccgcgaccgtcgcgatatcatcgtcatcggcaaggtgctcaacatcaagcgcctgctgcaaggcatgcaaatctgtaccgccttttaccagccagccgtcaccgtcggtaatgatttccggcgtttcgtcagcgtccgggaattcacccgcaatggcttcaagcacatccagcggcgtgaccagaccttgtaccacaccaaactcgttggtcacgataacaaagctcccgcgagcacgacgcagcacgcccagcaggttgatcggatcgagggtttccgggacgataatcgccggagacgccgaagctatcgccgccacatcaactccctcttccagcgccaccagcagttctttagcacgtacgatgccgataatttcatccagttcaccgcgacataccgggaacaaactgtgcggtgaggagagcagctgctcgcggatttcatcgaccccgagattagcatcaacccagcttatttcaccgcgcggcgtcatgatcccgcgcagagaacgcgacgccagcgtcagtacgccgttaatcatgtaacgttcttcttcggcaaacgcaccttccgggatcggcatcggcatcgggttatcggcatcgtgctgaacattggcctgacgtttcccgcccatcaaacggagaatcgcatcggcagtacgcgctcgcagcggcaaagtcgactggtgacgaataaagttgcgacgcgcaatctggttaaacacttcgatgatgatcgagaagccaatcgcggcatacaggtaacctttcggaatgtggaaaccgaaaccttctgccaccagactcagaccaatcattaacaggaagctcagacagagcaccaccaccgtggggtgctggttaacgaatcgcgtcagcggttttgatgccagcagcataaccgccatcgcaatcactaccgccgccatcatcaccggcaaatggttaaccatccctactgcagtaattaccgcatccaacgagaagacggcgtcaaggatgacaatctgtgtgacgaccacccagaaactggcgtagcctttaccgtggccggaatcatgatcgcggttttccagccgttcatgcagttcagttgttgctttgaacagcaagaatatgcccccgaacaacataatcaggtcgcgtccggagaaggagaaatccatgacggtaaatagcggtttggtcagcgtgaccatccatgaaatcagcgacagcagccccagacgcataatcagcgccagtgataatcccagcaaacgcgctttatcgcgttgttttggcggcagtttgtcagcaagaatggcgatgaagaccaggttatcgatacccagcacaatttcgagaacaacaagcgtgagtagccccgcccaaatcgaggggtccattaagaattccatgacaagctcctgcttaaggaatagctattcgacgccagaaataatgcaggcgtaacgacaaaatgcaaacgaaaggtgcggcataaagtgccagaaagacaggcgttaaaaggcctgatgctgaaatgacgtcggtgacgatccatactgcgggctactgccctatactccatggttgttaaacaggagttaaacatatcagagacgcctctgatttggcaaagatttaccttcctttgcaaacgaatgtgacaaggatattttacctttcgaaatttctgctaatcgaaagttaaattacggatcttcatcacataaaataattttttcgatatctaaaataaatcgcgaaacgcaggggtttttggttgtagcccttatctgaatcgattcgattgtggacgacgattcaaaaatacatctggcacgttgaggtgttaacgataataaaggaggtagcaagtgaccattgctattgttataggcacacatggttgggctgcagagcagttgcttaaaacggcagaaatgctgttaggcgagcaggaaaacgtcggctggatcgatttcgttccaggtgaaaatgccgaaacgctgattgaaaagtacaacgctcagttggcaaaactcgacaccactaaaggcgtgctgtttctcgttgatacatggggaggcagcccgttcaatgctgccagccgcattgtcgtcgacaaagagcattatgaagtcattgcaggcgttaacattccaatgctcgtggaaacgttaatggcccgtgatgatgacccaagctttgatgaactggtggcgctggcagtagaaacaggccgtgaaggcgtgaaagcactgaaagccaaaccggttgaaaaagccgcgccagcacccgctgccgcagcaccaaaagcggctccaactccggcaaaaccaatgggaccaaacgactacatggttattggccttgctcgtatcgacgaccgtctgattcacggtcaggtcgccacccgctggaccaaagaaaccaatgtctcccgtattattgttgttagtgatgaagtggctgcggataccgttcgtaagacactgctcacccaggttgcacctccgggcgtaacagcacacgtagttgatgttgccaaaatgattcgcgtctacaacaacccgaaatatgctggcgaacgcgtaatgctgttatttaccaacccaacagatgtagagcgtctcgttgaaggcggcgtgaaaatcacctctgttaacgtcggtggtatggcattccgtcagggtaaaacccaggtgaataacgcggtttcggttgatgaaaaagatatcgaggcgttcaagaaactgaatgcgcgcggtattgagctggaagtccgtaaggtttccaccgatccgaaactgaaaatgatggatctgatcagcaaaatcgataagtaacgtattgtgttgattatcactcagttttcacacttaagtcttacgtaaacaggagaagtacaatggagattaccactcttcaaattgtgctggtatttatcgtagcctgtatcgcaggtatgggatcaatcctcgatgaatttcagtttcaccgtccgctaatcgcgtgtaccctggtgggtatcgttcttggcgatatgaaaaccggtattattatcggtggtacgctggaaatgatcgcgctgggctggatgaacatcggtgctgcagttgcgcctgacgccgctctggcttccatcatttctactattctggttatcgcaggtcatcagagcattggtgcaggtatcgcactggcaatccctctggccgctgcgggccaggtactgaccatcatcgttcgtactatcaccgttgctttccagcacgctgcggataaggctgctgataacggcaacctgacagcgatttcctggatccacgtttcttctctgttcctgcaagcaatgcgtgtggctattccggccgtcatcgttgccctgtctgttggtaccagcgaagtccagaacatgctgaatgcgattccggaagtggtgaccaatggtctgaatatcgccggtggcatgatcgtggtggttggttatgcgatggttatcaacatgatgcgtgctggctacctgatgccgttcttctacctcggcttcgtaaccgcagcattcaccaactttaacctggttgctctgggtgtgattggtactgttatggcagtgctctacatccaacttagcccgaaatacaaccgcgtagccggtgcgcctgctcaggcagctggtaacaacgatctcgataacgaactggactaacaggtgagcgaaatggttgatacaactcaaactaccaccgagaaaaaactcactcaaagtgatattcgtggcgtcttcctgcgttctaacctcttccagggttcatggaacttcgaacgtatgcaggcactgggtttctgcttctctatggtaccagcaattcgtcgcctctaccctgagaacaacgaagctcgtaaacaagctattcgccgtcacctggagttctttaacacccagccgttcgtggctgcgccgattctcggcgtaaccctggcgctggaagaacagcgtgctaatggcgcagagatcgatgacggtgctatcaacggtatcaaagtcggtttgatggggccgctggctggtgtaggcgacccgatcttctggggaaccgtacgtccggtatttgcagcactgggggccggtatcgcaatgagcggcagcctgttaggtccgctgctgttcttcatcttgtttaacctggtgcgtctggcaacccgttactacggcgtagcgtatggttactccaaaggtatcgatatcgttaaagatatgggtggtggcttcctgcaaaaactgacggaaggggcgtctatcctcggcctgtttgtcatgggggcattagttaacaagtggacgcatgtcaacatcccgctggttgtctctcgcattactgaccagacgggcaaagaacacgttaccactgtccagactattcttgaccagttaatgccaggcctggtaccactgctgctgacctttgcttgtatgtggctgttgcgcaaaaaagttaacccgctgtggatcatcgttggcttcttcgtcatcggtatcgctggttacgcttgcggcctgctgggactgtaagactgttgtacactaccggggccttttggccccgtttttttatctggaggattaatgacaatcacggacctggtactgattcttttcatcgccgcactcctggccttcgcgatctacgatcagttcatcatgccccgccgtaacggccccaccctgctggcaattcctttgctccggcgtggtcgcatcgatagcgttatcttcgtcggattgattgtcattcttatctataacaacgtcacgaatcatggcgcgctaataacaacatggttattaagtgcactggctctgatgggtttttatatattctggatccgcgttccgaagatcatctttaaacaaaaaggttttttcttcgccaatgtctggattgaatatagccgaatcaaagcgatgaacttgtcggaagatggcgtgttggtgatgcaattagaacagcgccggctgttaatccgcgttcgaaatatcgacgatctggaaaaaatttataagcttctcgtttcaactcaataagttatgaatttagccaaagctatgtttagtgtatttttaataatcagacatagcttaggctatattacctcttcccttatttgttatttattttaacgtttcattgatatataaatctaaatgaaaatcgttatcaataaagcaatgaaataatatattccaacagttgttttatattctcaaaatatgttaaggttgcgccctcatttggggagtagccgatttccagattccggaaatgtacgtgtcaacatactcgttgcaaaacgtggcacgtacggactgaacactttcagtcaggcgagaccatatgcacatcaatcgctatgcctgcatgaacgcgaaaaccatcgcggcttgttgttcatgtatgcatgtttgctgggggcgatgatgtgttttatggataccccggtcaggacgttgtcatgaatatcactgctactgttcttcttgcgtttggtatgtcgatggatgcctttgctgcatcaatcggtaaaggtgccaccctccataaaccgaaattttctgaagcattgcgaaccggccttatttttggtgccgtcgaaaccctgacgccgctgatcggctggggaatgggcatgttagccagccggtttgtccttgaatggaaccactggattgcgtttgtgctgctgatatttctcggcgggcgaatgattattgagggttttcgtggcgcagatgatgaagatgaagaaccgcgccgtcgacacggtttctggttactggtaaccaccgcgattgccaccagcttggatgccatggctgtgggtgttggtcttgctttcctgcaggttaacattatcgcgaccgcattggccattggttgtgcaaccttgattatgtcgacattagggatgatggttggtcgctttatcggctcaattattgggaaaaaagcggaaattctcggcgggctggtactgatcggtattggcgtccagatcctctggacgcacttccacggttaataagaacgctgccagaggtgaatattaaagtccgtctggcagtcgaacacttcttttgctgccagtgcttgccagacttcaggcttcgcacgccaggcaaacggcgtcatctgcaataatgcgacggcttcatcaccgcgaagacgcatcagataacacaactcatcactctgctgtaatgtaaaacctttcagttgttctgcatgaggtgcatgaagatgtacttcattgtaaatcagccccttcagctccattaagtgtctcggtcccggcgtggcagtaatgacccaaccgccgggcttcactactcgcactaattcttctgctttacacggcgcgtaaatacgtattatggcgtccatactggtatcggaaaacggcaaacggtggctggaagcgacacaaaaagtgacctgcggatagcgtttcgccgccgcttttatcgctaccttcgagacatccaggccaaacgtggtgatttcgggcaacgcatcagcaaatgcgtgtgtgtaatacccttcaccacagccaatatccagcaccgccgcggccttttcatcaagccgttcccgcagttggccgacaattgcatcacgcagcggctgataatgtccggcatctaagaatgcgcggcgtgcttgcatcatttccgcgctgtcgcccggatcacgagaccgtttatgctgaacgggcagcagattgacatacccttctttcgccatatcaaactgatgtcgctggggacagatatagctgtttttttcacgcgaaagaggctgatggcaaagtggacaggaaaacgacatgacaactccggcaggatactaaaggccgcaagtgtaacgcgaatcatgcggcgggcaaatatccgaacgactggagcgaagataaaacaaagtaaaaagcctcgcattcgacgaggctttatagcgagattgaagcgtattcacacttcagatcagtggattcgatcagatagctgttacgttaacagctgccggacctttctgaccgtcctgaatttcgaactcaacgttctgaccttcagccagagttttgaagccattaccctggatagcggagaagtgtacgaacacatctttgctgccatcagccggagtaatgaagccaaaacctttagactcgttgaaccacttaacctgacctttaatctttgccatttgaaaaattccttagattgttttcttcgcccgcaggcataacatagataaaactgacacattactgcatgaggcaccaatataaggctcggcagagaagcggtattcaacgtcaacgtgtttactcaggacttctttactgaaaatgccacacataaacagaactgtacctcgtttaacccgaaatctgttatcacatacaacgttaattatggcaagccatttttaaacatgtctcgatcagacgcacaaatctcgatacgtcttccactttttttgcacacttatgcaacggaatacgcgccgatatatcattgtgcttaaccttgccagttcaggcagatacttaaactgacgtattttctaacatagttcaataagttcagttgttccaggcctgtgggagaagttattacatagtgcgtgcaatatcacattttctactatgcaatgaataaaaagttatatcactttttctcataaaacagtcagttaacggctatcaattaccccaaagagaagtcaatctccaaaggtattgtaaatttaaaataagaaaaattgatgaatgagtaaaaaaatcaagagagaaacgtttcgctaataaataataccacacttaatcacaaattcgatgtaaacatcctaataaattaatggggtaaatatctttttctgatatcccgttacgcaaataaataatatgataattatttgaagtcagaccagagttttaatttgaagcagttgcaccatgacagtgcgtataatcagcatgaattgagtaacccttcaacgacggggttactcaagattgaggaaggattatcgttcggcgaccagacgaataatatcttcgtcttcaaccgatttttgactctcaacggtctttttatctgctttctcaggttcgtttgcttcgcacaaacgacgtaacagtgcattttgacgtttttgctgatccagcaacgcctcaagcagttcaatctgttcgttagtccgtgaactggcacgattgataaaaaaccacaagatgagcccgataagaagaaccaccaccgatacaaccaaagacgcaatgttcatcacgcctgaatttacaacttcgttcatttcaccacctctgagtagaggcgctattctaccactgctggagaggaagaaaatctagtgctgaaaaaatgatatcaccacgggataaactggttaatggcacaaattccgctgaaaaattgtacatcctgatcgcacatcatgttgaatacctgcgcccaaagcagcaagcacgccaacaccacgacaaccagagcgacccatcgaaactttttcactccaatctccgtttcacctaccttatgtcattaaactagcatgcgttagttaaacagcgcctaactatgtcgatattcgtgctttttcggaatgagtcgcttgcttcagcgcatattgccgctacgattaagcgaacataaaaagagaagaggttgtaatgcgattcatcattcgcacagttatgctgatagcgctggtatggataggattattactcagcggatatggcgttttgattggaagcaaagagaatgccgcgggattaggtttacaatgtacctatctgaccgccagaggcaccagcacggtacaatacctgcacactaaaagtggttttctggggataacagattgcccgttgttacgtaaaagcaatattgtggtcgataatggttaaggataataaataaccagattctcactcatgagtaaaatattcttatcgcaagtgcgtttaatataacgccaccttcaactttatttttctcatgctaaataaagaacctgtctgtttgatattcagacaggttcttactctcctcagaacggatagtcgtgataacccatttgggcagaaattttgcgcgccgcggtatgcaacattgcgacatattcctgtaaacgctcttcagagaaacgcaacgtcgggaaggagatgctcagaccggcaatgaccacgccaaagcgatcaaataccggaaccgcaatgcaacgcagtccttcttcctgctcttcattatcttcgccatacccctgctcgcgcacctggtccagaacgggtaataacgcttctgtactggtgatggtccgctcggtactgcgtttatactccacgccctcaagaatttgcatcacttcatcgcgatcgcgccatgccagcagtaccttaccaatcgcggtgctgtacagcggattacgacgcccaatccgtgaatacatgcgcaaattgtacattgagtcaattttgtggatgtaaacaatactgtcttcgtccagtgcgccgaggtggatagtttctttggtcaggcgggagatctcacgcatctggatatctgcgctacgaattaaatcgacgttttgcaacgcgcgagcgcccagttcgaacaatttcagggtcagcgaatatttctccgactccccttcctgcgccacataacctaaagttttcatggtctgtaaaaagcgataaacggtgctttttgacatcatgacgcgctgcgacaactcggttatccctatttcgcgctcttcacccagcgcctgcaaaatgccaaaaacttttagcacggaagatacagaatcaggctgtttatccagatctgcgttagccatttatcacctcattgcgagtgttttataaaaatcagaactgttttttattataatttcgcacctgggtggtcgcaatccatcttttgccggttagttacaattctgcgacatccaccgtgaatatcagtgctagaatcatacccctgttgattattcaccaaagatataaaattcctatgccaaaagttcaggccgacggcctgccattgcccctgcgatacggtgcgatattaaccattgtgattggtatttcgatggctgtccttgacggcgcaatcgccaacgtcgccttgccaacaatcgctacggaccttcatgccacgccggccagttccatctgggtagtgaacgcctatcaaatcgccattgtcatctccctgctctcgttttcgtttctgggcgatatgtttggctatcgacgtatttataaatgcggtctggtcgtttttctgttgtcttcactgttctgcgccctttctgattcgctgcaaatgctcacccttgcgcgtgtcatacaaggtttcggcggtgcagcgttgatgagcgttaataccgcacttatccgcctgatctatccacaacgttttctgggtagagggatgggcataaactcgtttattgttgccgtctcttctgctgccgggccgacaattgctgcagcaatcctctccatcgcatcctggaaatggttatttttaatcaacgtaccgttgggaattatcgccctgcttctggcaatgcgttttctgccacccaatggttctcgcgccagtaaaccccgtttcgacctgcccagcgccgtgatgaacgcgttaaccttcggcctgcttatcactgcgttgagtggtttcgctcaggggcaatcgctgacattgattggtgcggaactggtggtaatggttgtcgttggtattttctttattcgccgccagctttctcttcccgtaccgctgctaccggtggatttactgcgtatcccgctgttttcactttctatttgcacatctgtttgctctttctgcgcacaaatgctggcaatggtttccctgcccttttacctgcaaaccgtgctcgggcgtagtgaagtcgaaacaggtttacttctgacaccgtggccgttagcaacgatggtgatggctccactggcaggctatttgattgaacgcgtacatgcaggattgctgggtgctttagggttattcatcatggctgcggggcttttttccctggttctgctgccagcgtcacctgcggatatcaatattatctggccgatgatcttatgtggtgctggatttggcttgttccagtcacccaataaccacaccattattacctccgctcctcgcgaacgtagcggtggagccagtggcatgttagggacggctcgtcttctgggtcagagtagcggcgcggctctggtagcgctgatgctaaatcagtttggtgataatggtacgcacgtctcgctgatagctgcggctattctggcagtgattgctgcctgtgtcagtggtttacgtatcactcagccacgatccagggcataaaaaaagcgcgtcgatcaggacgcgctttttagtatttacttcatattacttcaggtattcacccgtacgcagagcttcaatacgtttatccagcggcgggtgagtcatgaacaactcactgagcgatttcgacttcccgttaatgcagaaagccatcatgctggttgcttcttgcggttcatagctggttttcaggcgctgcaatgcagcaatcattttctcgcgaccaaccagttttgctgaacccgcatcggcgtggaattcacgatgacgcgagaaccacatggtgataatgctcgccagaataccaaacaccagttccagaaccgttgcaaccgcaaagtagatcagcgggttgccgttgctctcttcaccttcatcacggtttccgcccataaaacccgcggcaagctgcgccagaatacgggaaataaagataacgaaggtgttcaccacgccctgaatcagcgtcatggtgaccatatcaccattggcgatgtggctgatttcgtgagcaattaccgcctcggcttcatccgggctcatgttctgcagcaaaccggtgctgacagcaaccagagaggcatcacggcgcgcaccggttgcaaaagcattgatgtccggcgcatggtagatagccacttgcggcatagcgatccccgcctgacgagcctgggttgctacagtattgaccagccaacgttccctttcgttacgcggttgctcgatcacttccccgccaacagatcgtaatgccatccatttggacatcagaagcgaaacgaaggaaccaccaaaaccgaacagcaaggccatgatcatcagcccctgaacgctgctcgactgtatccctgtcaggctcagtaccagcccgaaaacgaccattacggccaggttcgttagcaggaagagcgcgattcgcatcataattttctttttacctcagtttaacaaaacgcaatatgcgatacccacatcgtatgggttacgcgactattttcaagtctggatagtgcgtaagtcaccagaaagacacaactttacattttgtagcatctgatttacggcatcttgccgctgttaaaaaatcaggcacaatttcttgtgcctgattgatattacttgacgggagcgggttgttccgcgggtctggctttttcaagcttcgccagatcgagtgcgatattcaccgtctcatccagataaggatctggctcctggtaatctttcggtagatcatccagtttcttcaactccggtttaccttcgcgtttaaagcgttcgttcaaacgcgccagacgcgtcgcatcatcttcattattctctttctcacgcacagcgtaattcagagaaacgatattgcgcttgtccttcatagcgttgaagcgcgcgatatccttcatgatgttctggaactcaggatctttcgcgatacgcgcattatgttccttcagcagctccggttcaaaggccgttaaatctcctgatttcacataagtcgcggcatcaatgctatcccacggcagcgcgttatcttcgaatttctcacccgtttccgtttcttcattacccgtcggcatgatgatgtctggcgttacgcctttacgttgcgtactgccgccgttaacgcgatagaatttctggatcgtgtactgcacagaacccagcgctggccattcaggacgtaacatctgatcgtaaatacggtttaatgaacggtactgctgaacggtgcctttaccaaatgtcggttcacccacaaccagggcacgaccgtaatcctgcattgccgcggcaaagatttctgaagccgaagcactgaagcggtcaaccagcaccaccagcgggcctttatagaagacctgtccgtcggtgtcgctgtcttcacgaaccttgccgttgttatcgcggacctgaacaatcgggccggatggaatgaacagaccggagagcgatacggcttcagtcaacgccccaccaccattgctacgcaggtcgataatcacactgctgacattctgtttttccagtttctgcaattgcactttgacatcgtctgtcaaacctacatagaagcccggaatatccagcacgccgactttctctttaccgacggtcttcaccgacattttaaccgcgcggtcttcgagacgaatacgttcacgggtcaacgttaccgtacgggtcttggtccctttaccagcaggtaaaatttccagacgaaccttactgcccttaggccctttaattaaggccaccacatcatcaagacgccagccaatcacgtcaaccatcggcttgcctgtttgaccaacaccgacaattttgtcaccaacgctgatagctttgctcttcgctgccggacctcctgccaccatcgaattgataacggtgtagtcatcatccatttgcagcactgcgccaataccttccagcgacaaactcatttcagtgttgaactgttcggtattacgcggggaaagatagttggtatgcgggtcgatttcacgtgcaaacgccgtcattgccagcgagaaaacatcttcgctgttggtttgcgccagacgacgaatggcaaatttgtagcggcgagtcagggtttcacgaatttccttatccgtttttcctgtcagcttcaggcttaactcgtcgaatttgactttactgtcccacagcgcgttcaactcagcctcgtttttcggccagggcgctttgctgcggtcaaggttataagtgtcgttgccggtgaaatccatcggcttttccagtaccgacaaagcgtactggtaacgttcaaaacggcgcttttgcgccagattgtagagatcgtagaaaacgtcgagtttacctgaacgcagttcatcgcctaactcagttttctttttcgcgaactgttcaacatcgcttgccagcagcacattgtggctgtaatcgagcagattcaggtagcggtcaaagattttggccgaaaatgcctgatcgaggtcgaactggcgataatgagaacgggtgaagcgcgacgttacgcgctcactcaccgtcgcatgctgcgtctcttcctttaataccggaatttgatcagcacgcgtgatatcttctacagcgaaggtctggcctgctattgcaagcaggccagctaacgcggtaagcctaaaaaacatgttcatgcctggcccggcctccgtttcagaacaccaggtgttctgcgcgcacaatcaaagacatacccgaattcagctggacgcggacgccgtctttggtgatttctaatacggtggcatccatcgcgttttgacccgctttcaccttcagggcttgtccgacagtcagagctgaaatgtcagaaaccggggtgtgctgttcttcgcgaggtgcttttactgtttttggcgctttctctaccggcttttgcgaacgaggtttacgttcagcgccttctttgcggcgtggcgtggtcggacgtggcttgcgttcgcggcgcggtgcgtcttctttctcaccagcagctgcggcagcttcgcgttttttcgcttgctgttcagcacgctgtgcctgaacacgcgctttcgcttcttcaagctgcttgcgagcatgctcgacatgttgctcgtccagctcaccgcatgggttgccgtcaagatcgacacgtgttgcgccgggtttaacaccgtaaagataacgccagctcgaagtgtagagacgtaaagcggatcgcaattgcgttttgctcaggttcatttccccggcaacacgatcgaccaaatcctgaaaaataccgattttcagcggacgcgcttcaccttccgcactgaaacagtggggaaaacgttcggccagaaacgcgattacttctttactgctattcaacttaggttgattttccatgaaatttcctgattacaacggacgtagccaacaagcgcaggcatgaacaggcgtcattataatgacgctatcagtaaatgctacgttatccgttgattatcctgcgacgctcgcaaagaattttttgtaatccgtcgttgcaagcactttttcaagctgtgccacaagctgacgtaagccttgctcatcctcgtctgtaaagcgaccgaagacggtactatcgatgtcgagaacaccaataatctgatttttcaccaccagtggcagaacaatttcagaattactcgccgcatcacaggcaatatgcccgtcaaacgcgtgaacatcctcgatacgctgcacttgattgcgggcaaccgcagtgccgcatacgccgcgcccaacgggtatccggacacaggcaattttgccctgaaatggtccgagcaccagtgtatcgtcctcaagcaaataaaaacctgcccagtttacgtcagtgagacgctcatataacaacgcactggtgttcgcaagcgttgccagaaaactggtttctcccgccatcagcgcgttaaagtcgcgatttaaatccgcgtaaaattctgctttgttcattatataatcacttggttgtcttacctggaactgccagcctattaaaataagcattaaatgcgttaatgctcaagatcattcccatcatgggttaagattaatgttaattcttattacatttggcacgtcatggctcttaacacaccacaaattacgccgacaaagaagataacagtgagggctatcggcgaggaactgccgcgtggtgattaccaacgttgcccgcaatgtgacatgctgtttagcctgcccgagataaattctcatcaaagtgcctattgtccgcgctgtcaggcaaaaattcgtgacgggcgcgactggtcgctaacgcgcctggcggcaatggccttcaccatgctgttgcttatgccgtttgcctggggcgaaccgctgttgcatatctggctgttaggcattcgtattgacgccaacattatgcaaggcatctggcaaatgaccaaacagggcgatgcgataacggggtcgatggtctttttctgcgttatcggtgcccccctcattctggtgacctccatagcttatttatggtttggtaaccgattgggaatgaatttacgcccggtactgctgatgcttgagcggctgaaagagtgggtgatgttggatatctacctggtcggcattggcgttgcttctataaaggtacaggattatgcccatatccaggcgggggtcggcttgttctcttttgtggcgttggtgattttaacgacggtgacgttgtcacatcttaatgtcgaagaactgtgggagcgattttatccgcagcgccccgctacgcgtagggacgagaaactccgtgtctgtcttgggtgccattttaccggctatcctgatcagcgtggtcgctgcccgcgttgccatatcccgctacgcctgcgtcgccgtcatagtctgcaaaaatgctgggcggcgctgttagcgtcaatcgttttgttgttacctgccaacctgttgcctatctctatcatttatctgaatggtggtcggcaggaagatacgattctttccggaattatgtcgctggcaagtagcaacattgcagttgcgggaatcgtgtttatcgccagtattctggtaccgtttactaaagtgatcgtcatgttcactttactgttgagtattcattttaaatgccagcaaggtttacgcacacgcattctgttactgcggatggtgacctggattggtcgctggtcgatgctcgacctgtttgtcatatctttaaccatgtcgctgattaatcgcgatcagatcctcgcttttactatgggaccggctgcgttttatttcggcgcagcggtaattttgactattcttgctgtggaatggctggacagccgcttactttgggatgcacatgagtcaggaaatgcccgcttcgacgactgaagcgcagattaaaaataaacgccgtatctcacctttctggctgctgccgttcatcgcgctaatgattgctggttggctgatttgggacagttatcaggaccggggcaatactgtcaccatcgactttatgtcggcggatggtattgttccaggccgtacgcctgttcgttatcagggcgttgaagttggaacagtgcaggatatcagcctcagcgacgatcttcgtaagattgaagtcaaggtcagcatcaagtccgatatgaaagatgcgctgcgcgaagagacacagttctggctggtgacgccaaaggcctcgttggcaggtgtctccgggctggacgccctcgtcggtggtaattatatcggcatgatgccgggtaaaggtaaagagcaggatcactttgtcgcactcgacacccaaccgaaatatcggctggacaatggcgatctgatgatccacctgcaagcccccgatctcggttcactgagcagtggttcattggtctatttccgcaagatcccggtgggaaaagtctacgactatgccatcaatcccaacaagcaaggcgtggtgattgatgtcctgatcgagcggcgttttaccgatctggtgaaaaaaggtagccgtttctggaacgtttccggcgttgatgccaacgtcagtatcagtggcgcgaaggtgaaactggaaagtctggcggcactggttaacggtgcgattgccttcgattcacctgaagagtcgaaacctgccgaagcggaagatacctttggtctgtatgaagacctggcccatagccaacgtggcgtaataataaaactggaactgccagacggtgccggattaaccgccgactcgacgccgttaatgtatcaggggctggaagtcggacagctgactaaactggatttaaatcctggtggtaaagtcactggggaaatgaccgttgatcccagcgtcgtcaccctgcttcgtgaaaatacccgcatcgaattacgcaacccgaaattatcccttagcgatgccaatctcagcgccctgctgaccggaaaaacctttgagttggtgcccggcgatggcgagccacgcaaagagtttgttgttgtgccaggcgaaaaagccctgctgcaagagccggatgttctgacactgaccctgacagcaccagaaagttacggtattgatgctggtcagccgctcattcttcacggcgtgcaggtaggccaggttatcgatcgtaaactcaccagcaaaggcgtcacctttaccgtcgccatcgagcctcagcatcgcgaactggtaaaaggcgatagcaaatttgtcgtcaacagccgcgtcgacgtgaaggtggggctggatggcgttgagtttctcggtgccagcgcctcagaatggatcaatggcggaatacgtattctgccgggcgataaaggcgagatgaaagccagctatccactgtatgccaatcaggaaaaagcgctggagaacagccttagcgatttacccaccacaaccgtgagtttgagtgcagagacgctgccggatgtgcaggcaggatcggtagtgctgtaccgtaaatttgaagttggtgaagttattactgtgcgtccgcgagctaacgcgtttgatatcgatctgcatattaaaccggagtatcgcaaccttctgaccagcaacagcgtgttctgggcagaaggtggggcgaaagttcagctgaatggtagtggtctgactgtacaggcatccccgctctccagagcattaaagggggctattagcttcgataacctcagcggtgccagcgccagtcagcgtaaaggcgacaagcgtattctgtatgcttccgaaacagcggcccgtgcggttggcggacaaattacgcttcacgctttcgatgccggaaaactggcggtcgggatgccaattcgctatctcggtattgatatcgggcaaatccagacgctggatctgattaccgcacgcaatgaagtacaggcaaaggcggtgctctatccggaatatgtccagacctttgctcgcggtggtacgcgcttctcagtggtcacaccgcaaatttcggcagctggcgttgagcatcttgatactatcctccagccgtatatcaacgtcgaaccaggccggggcaatcctcgccgcgactttgaattacaagaggccaccattactgattcgcgttacctggatggcttaagcattattgttgaagcgccggaagccggttcgttaggtatcggtacacctgtgctgttccgtggtctggaagtaggtacggttaccggaatgacgctggggacattgtcagatcgcgtgatgattgcgatgcgcatcagtaaacgctatcaacacctggtgcgtaacaattcagtcttctggttggcatcgggttacagtctggactttggtctgacgggcggcgtagtgaaaaccggcacctttaaccagtttatccgtggcggcatcgccttcgccacgcctccgggtacgccactggcaccgaaagcccaggaaggcaagcacttcctgttgcaggaaagtgaaccgaaagagtggcgtgaatggggaactgcgcttcccaaataatgcccactgctccggcgtgcctgcgccggagcgtttatgctaaactgcgcgcctgtttttttgccagtggtatatgctcgtggcccaacacaccgtttatttcccggacgcctttctgacacaaatgcgcgaagcgatgccttcgacgctctcttttgatgattttcttgccgcctgtcagcgcccgttgcgccgcagcattcgcgttaatacgctgaaaacctccgttgctgatttcctgcaattaactgcaccttatggctggacgcttacgccaattccgtggtgtgaagaaggtttctggattgaacgcgacaatgaagatgcattgccgttgggtagtaccgccgagcatttaagcggcctgttttatattcaggaagccagttcaatgttgcctgttgccgccttgtttgctgacggtaatgcaccacagcgggtgatggatgtcgctgctgcaccaggttccaaaacgacgcaaattgctgcgcggatgaataacgaaggggcaatccttgccaatgagttttccgccagtcgggtaaaagtgttacatgccaatatcagccgctgtggcatcagtaatgttgcgctcacgcattttgatggccgcgtatttggtgcggcagtgccagaaatgttcgatgccattttgctggacgctccctgctccggcgaaggcgtggtgcgtaaagatcccgatgcgctaaaaaactggtcaccagaaagcaatcaggaaatcgcagcgacccaacgggagctgatcgacagcgcctttcatgcattacgtcctggcggtacgctggtttactcgacctgtaccttaaaccgggaagaaaacgaagccgtttgcctgtggctgaaagagacttaccacgacgcagtagagtttttaccgcttggcgatctcttccctggtgcaaataaggcgctgaccgaagacggctttttgcatgttttcccacaaatttacgactgcgaaggcttcttcgttgctcgtctgcgtaaaactcaggcgatccccgtcttacccgccccaaaatacaaagtgggcaatttcccgtttagcccggtgaaagatcgcgaagccggtcaaattcgtcaggcggctgcaagtgttggcttaaactgggatgaaaacctgcgactctggcagcgtgacaaagaactgtggttgttcccggtaggcattgaagccctgatcggtaaagtccgattttctcgcttggggattaaacttgccgaaacgcacaacaaaggttatcgctggcagcatgaagccgttattgcccttgcctcccccgacaatgtgaacgcttttgaactgacaccgcaggaagcggaagagtggtatcgcgggcgcgatgtttacccgcaagccgcgccagtggcggatgatgtattggttactttccagcatcagccgattggtttagccaaacggattggttcacgactgaaaaacagctacccgcgtgaactggtgcgcgacgggaaactttttaccggtaacgcctgacagcgcacaaaaaaagcgcactttttgactggcacattcaactgcctcaactaggctgaaaaatggtgcgatcggactggtcgtaccacaaccggcagctaaatggagagcacgaagatgaaaaccagtgtgcgcataggcgcttttgaaatcgacgacggcgaattacacggcgaatcgccgggtgatcgaacgttaaccattccttgtaaatcagaccccgatttatgtatgcaactggatgcctgggatgctgaaaccagtatccctgccctgctaaatggcgaacactctgtcctttaccgtacccgttacgatcaacaatctgatgcctggattatgcgtcttgcctgatccaaaaagaacccgtcggcatggcgggttatttgtccgggttattcccccgttgtaaaatctctcctaaacttaacggtacggcaccacacttcggggatgaaatgttcgcgctggtactttttgtttgctacctggatggcggttgtgaagacattgttgtggatatctacaacacggaacagcagtgtctttattctatgagcgatcaacggatccgccatggcggttgttttccgattgaggattttatagatggtttctggcgacctgcacaggagtacggtgatttttaattattgcaattgcacaagagtcagttctcccccaaagacagcaccggtatcaatataatgcaggttgccaatatccacgcgatggcgcaaaggtgtatgaccaaaccagaaatgatcagcacctgcaattccctgccctttttggcgttcacctaatcgcgagcggctccacaagacctgatgcaaatcgacgtccttttgccattcatagacatcatctggataatcggcatgagcaataacatgtttgccggtgcgactgtgtaattcaagaataaagggcaaatgctgacatttttccagcgccgttttcgcttgtttctgttgattatctgccagcgcaataaaccagtcgccgccatttatcaaccataaagacatctgccgggatgccagcgcatccatcgccatctgttcatgattgcctcttaccgcacgaacccaatgttgttccagtaactgcaggcaacgtaaactttgcggcccacgatcgataacgtctcccactgagataagtaaatctcgccacggatcaaaacgacaatgccataatttgcggcgcaactgctcaagacaaccgtgtatatcgcctgaaagccagatatgtcgccattgatgacccgcaattctctgataaacgggcgcaggctgtttcatcaatattttcctcccgcgctaaagatcacataatcttaacaagaatgttaaaaaacgctggactcagacagtagagtgtgtgttatggttgactataaagtcagcgaagggaatgcttctggcttttaacagataaaaagagaccgaacacgattcctgtattcggtccagggaaatggctcttgggagagagccgtgcgctaaaagttggcattaatgcaggcttagttgccttgctctttaagaatagatgacgacgccaggttttccagtttgcgtgcaaaatggtcaataaaaagcgtggtggtcatcagcttaaatgttaaaaaccgcccgttctggtgaaagaactgaggcggttttttattggaaatcaaaaggctattttaggtaattaacagagtttttcagctcgctctataaacggtgccagactcattttttcgccgggattgttaggatcatcaatctgaatcaccgaaatgggttgggctttagtcttcccactggcaacttccttttgtgcgatatcgtttaaaggatactgcacgagggtacttgggttaatgacatacaaagcattacccggtcggcaagtcagcatcacctcttcgcgattaaacgcccatttgtctttacccacttcaaaacggctgacggtaatcacctgcggtgccgccagcgcagctgcagaactggtgagtaacagaaacgccagaatactttttctcatcattttcgtaatccatcaaaaaggttcgagagtcgcaagcaggctgatgatcaccagcactaccgcacctatcgcccattcgagtttagtcatccagacaaaccagggagccgcacgatcttcatcctgcctcatgcgcggtacaagaacataacgattagccagcgcgatgaccaccataatcatcaccaggatggctttgagcaataagagttggccccagtaagtcgtaagcgtggggggaaatccggtaatcaacaatgcattaagcacgccgcttgccagtacgccgatcaccgcaaaatgcccgcaccaggaaaaacgcatcagcgcctgaatagcctggtgtcgccaacggcctttgatgagttgcatacaccagagcaccggcagtaatcccccaaaccacgccgccgcacagatcaggtgaattgcgtgattagtctgatggattttcgccgttaccccttcattcaacgtcgcatgcccgactcccgccagcagaataaattgcgcggtagtgagcataaacagcaaacgtggcatattccgcggttgcataagggcgacgatcaacgttacgagggcgagaacaatttgccataaccagacgccaccaaactgcgtttgcaaaacagccaaccaaatgtttggcgaaaatacatctgaccatcccgctcccatcaacccgccctgaacggcgagcattgcagtggcactgatcaaactccagacggcagcgtgctgttgtaaacgcagaaaacgcttcgtcagcaagcgacgaatcgttaagggggccagccaggcaccgtacattgcgaagccaaaaaccagcatcagcgaggtgaaatggataaatcgcagcgcgatccaggtaaacgccagcatgatttatttcacactaaaggtgtaatgtcctttcgttttatgcccatccaccgaaacaacatgccagtcaacggtgtaggttccgggtttcagcgaatcggccagtggaacaatcagttgcttttggtcctgctcattccgcttcgccggtaatgttttaatattttcgttttttggccccgtgatttttgcaccactgaatcctgtttcaacgccttccgagaagtttaaagtgattgcctgcggagctgctgtcacttgtgcatttgccgcaggatactgatgcgttaaatgcgcatgtgcccagacggaaggtgtcaccaacgaagtggtcaggattgccagcgcgtagcgaagggagcgtgcagttgaagccatattatctattcctttttgtaataacttttttacagagcataaccttgtctaatgtctgagtcgaggatcatcaattccggcttgccatcaaggctcactcttagtaacttttgcccgcgaatgatgaggagattaagaatgctgaagaatctggctaaactggatcaaacagaaatggataaagtgaatgtcgatttggcggcggcaggggtggcatttaaagaacgctacaatatgccagtgatcgctgaagcggttgaacgtgaacagcctgaacatttgcgcagctggtttcgcgagcggcttatcgcccaccgtttggcttcggtcaatctgtcacgtttaccttacgagcccaaacttaaataaaacttatacatagttacactttcttacataacgcctgctaaattatgagtattttctaaaccgccccccataatttgcagtcattttgaaaaggaagtcattatgtcgttctggaaagttgcagcagcgcaatatgagcctcgtaaaacctcactcaccgaacaggtagctcatcatctggagtttgtgagggccgccgccaggcaacaatgtcagctgttagtttttccatcgctttctttactggggtgtgattattcgcgacgtgcccttcctgccccacccgatctctcgctattagacccgctttgttatgccgcaacgaccttgcgaatgaccatcattgccggccttcccgttgaatataacgatcgctttattcgtggaattgcggtgttcgcaccgtggcgaaaaacgccagggatctaccatcagagttatggtgcatgtctgggccgtcgttccagaaccatcacggtggtcgatgaacaaccgcaaggtatggatatggacccgacctgttcactgtttacgacagggcaatgtctgggagaacccgacctgctggcgtcggcccgtcgcttacaatttttttcacatcagtactcgattgctgtgctgatggcaaatgcccgtggtaacagtgcactatgggatgaacatggtcgtctcatcgttcgcgccgatcgtggttcattattgttagtcggtcagcgttcatcacagggttggcaaggcgatatcattccattacgctaggctttttcggcctggagcatgccatgttgcgcattatcgatacagaaacctgcggtttgcagggagggatcgttgagattgcctctgttgatgtcattgacggaaaaatcgtcaatcccatgagccacctggtgcgtcccgatcgtcctattagtccacaggcgatggcgattcatcgcatcaccgaagccatggtcgccgataaaccgtggattgaagatgtgatcccgcactattacggtagtgaatggtatgtcgcgcataacgccagctttgaccgccgcgtactgcctgaaatgcccggtgagtggatttgcactatgaaactggcccgtcgtttgtggccagggatcaagtacagcaatatggcgctatataaaacacggaagctcaatgtacagacgccgccgggcctgcatcatcaccgcgcgttgtatgactgttatatcaccgccgcgttgcttatcgatattatgaacacctctggctggacggcagaacagatggccgatatcaccggacgtccatcgttgatgacgaccttcacctttggcaaataccgtggcaaagcggtttccgacgttgccgaacgcgatccgggctatctgcgctggttgtttaataacctcgacagcatgagcccggagctgcgtttaacactgaaacattatctggaaaatacttaatccgctgactgagcgggtaatgttccctgtgccagcgcgaccagaaaagcatattccatcgctacgccttcgtacgatttaaagcgaccagatttaccgccatgacctgagtccatgtcggtacagagcaataaaagatggtcatcggttttcagctcgcgcaatttagcgacccattttgccggttcccaatattgcacctgagaatcgtgtaaaccggtcgttaccagtaaatgcggataaacctgtgcagtgacgttgtcatacgggctgtagcttttcatatattcgtaatattgcggatcctgcggattcccccactcttcaaattcgccggtggtaagaggaattgattcatccagcattgttgttacaacatcaacaaacggcacctaggcgataacgccgtggaacaattccgggcgttgattaatcgcaacgcccatcaacataccccccgcactcccgcccatcgcataacagagcgaaggagagccatagcccagttttaacaatgcatcgcaggcatcaagataatcattaaacgtatttttcttcttcagaaatttaccgtcctcgtaccattgttgccccagctcaccgccgccacgaacatggacaatggcgtagacaaatccacgatccaacaaactcaagcggctaaaactgaaatcggcatcaatacttgcgccgtaagaaccgtagccatacaccagcagcgggttgtgtcctttgcgaaaatgtttgcgatgatagaccagcgaaaccggaacttcgacgccatcacgggcgactatccacaggtgttcactgcggtaattcgccgcatcaaaaccaggaacttccgtttgttttaatacacgacgctcaccggtatccatatccagttcaaacaaagtatctggtgtggtcatggacgaataaccataacgcaatcgcgcggtttcaggttctggattgtaggcaatccaggtcacataggccggatcatcaaaggcaatgccaatgacttcccgggtcttgcggttaatttgccgcaaactggttaacccgcgctgacgctcttcaaccaccagccagtcggtaaacagcgtaaacccttccagcataatgttatcacgtggcggaattaactcttcccactgttgctcatcacgcatacgggtacggtataagccaaagtttttaccgtggcggttggaacgcagataaaaccgatgctggtagtgatcaaggctgtattcgtgatctttgcggcgaggcagaaaaacaaacggctcggcatcggccatttccgcgtccagcaggcgaacttcactggtggtggcgctggccagatgaatgaccacataatgcttcgaggtcgttttatgcaggctgacgtaataggtatcgtctttttcttcgtaaatcagtttatcttgcgatgctggcgtaccgatggcgtgacgccagacctgataaggcagcagcgtcactggatgcttgcgaacatagtagaaagtccaggagtcatttgcccagacaaagctgggttcaacgttatccagcagttccgggtaccagttacctgtttccagattacgaaaacgaatgccgtactgccgtcgggaaagaaaatcttctgccagtgccataatggtgttatctggcgtaatcgccattccgcccatcgaataaaactcactatgagccgcgcgcttgttggcatcgagcaatgtttcccactcgtcccactcttcactgaacgccgattgacgctggtagatagcatattcacagcctggttcataaatatgccgatagcggtagccatttttgatgtagggcgcagaaacttctcgttgcggaatgcggtcgatgatttcctttaagatgcgatcctgcaaggcttgttgcgaggccatcacccgatgaccgtaactattttcttgttgcagatagtccaggacttccggctgagaacgcgtatcgtcccgcagccagtagtaattatcgatgcgcgtatcgccatgaagcgtcatggcgtggggaatgcgggcggcttttggtagcatgttattgttctttctggttgaaacatcttataagggtggcaaaactcatcggggatgcaagcgaaacagggtagtcattgcttagatgatgacaggtaatggcgcggatatcgactgttatgcagacagagaaaatcagcctgttcaaatggctgtgcggttctggataacccgaaatagtcaacttcaggctatccagagagcggaattactccgccaaagtacgtttttgctgttcgagatcgcgttcaatgccttcacgaacgtcctgggggattttcagcgcatcacccagtgcattcaggtaactgcgttccataaaatgatcaatatcaatagccgcgcagctcaggaaatagatttccagcgcctcttcttcattgcggaccccagtagccaggcgttgtggatccagcggttgttcgattgcctgctcaatgagtacacgcccctgttcttccacgccggcttcacgcaattgcaggtcgattgccgcacgttctttggcatcaatatgaccatcacttttagcggcaaagaccagcgcaaggatcaaacgttccgtacgctcatccagcggcgtactttgcgcgccaaactgcggttcgtcctgatgcgccgcgcgaattttatctttgtatttattccacagcaccgtacccgctaccgctccgccgccaaccagtaacgcgtttgtgccatatttcgtaagaagtttacgtgctgatttatttgcgaccagcagcccagccagtccgcctaatgcgccaggcactaaaagtttgcccaatccctgatccgcagacgaggaggtagaagaacggctttgcccaagcagagattgcagttgatttaaccagttagccatatttgctcctcaataaccatttttagtgcctgtagcatagcggatgaggatgtcagaaaatgtatatcgagacaaaagatgcgcaaataagcggggcggtaggccgttattcaaagaaattcgcgccaggtaaggtgttcactgtatataaggtgataagggtattttaggtgaaagtagtttgacgttttgagtgaaactgtttgatgctgattgcccaatgcgacgctgttgcgtcttctcaggcctacgattatgttgcgttgtagggcggacaaggcacccgcgccgcatccgccaacggtcaatcgaattatcagaagccattaacgccgctgatattccgccattcccgctttgcagtccacgctgacctggtaatgaatatcggcacttttaccacgcacggttagcggtactgaccatttatcatctttcccctgaatgtcctgcaaactgacccatgccacgggatcggcctgaccgacaattttttgatcatcagcccagcgcgccacgcgattttgttggtaatcacgttttacgctcgcggcaattccggcagcatccagaccttcacactttgggaaagtgaccgacttgctggtttcattattggcagcgaaaactgatgcgcaggcagaaaccaacaacagccctaaaaacgcccctctttttttcatgtttttctccatagcacaatgattcaggagaaagcatggtacaaattttcaggagcgcaagttgcttcaggccgcgtgtgaggcatcttcctcttcggattcagcaccgacgacctgtggggacggtaatttgccggttttcagaatggtgctcagcacatctttttgttctgccagccatagcgaaagggcttcacgttgctcgtcttccatttgcactggagaatttgtcagccaggtgtcaagcagatcggccgtatcaagcatcttgtcataagcatcggcttcctttttgctggtaaacgacattttctcttcgccctcacgaatgactacgtatttaacttcaaccgccatttgcagcctctcataataactgtgattttatacagtatatttcttttcagttgggaaatcaacatcagcaatgaagacacacgcaaacgttttcgtttatactgcgcgcggaattaatcaggggatattcgttatgacgttattaggcactgcgctgcgtccggcagcaactcgcgtgatgttattaggctccggtgaactgggtaaagaagtggcaatcgagtgtcagcgtctcggcgtagaggtgattgccgtcgatcgctatgccgacgcaccagccatgcatgtcgcgcatcgctcccatgtcattaatatgcttgatggtgatgcattacgccgtgtggttgaactggaaaaaccacattatatcgtgccggagatcgaagctattgccaccgatatgctgatccaacttgaagaggaaggactgaatgttgtcccctgcgctcgcgcaacgaaattaacgatgaatcgcgagggtatccgtcgcctggcggcagaagagctgcagctgcccacttccacttatcgttttgccgatagcgaaaaccttttccgcgaagcggttgccgccattggctacccctgtattgttaaaccggtgatgagttcttccggtaaagggcagacgtttattcgttctgcagagcaactagctcatgcatgggagtacgctcagcaaggtggtcgcgccggagcgggccgcgtaattgttgaaggcgtcgttaagtttgacttcgaaattaccctgctaaccgtcagcgcggtggatggcgtccatttctgtgcaccggtaggtcatcgccaggaagatggcgactatcgtgaatcctggcaaccacagcaaatgagcccgcttgcccttgaacgtgcgcaggagattgcccgtaaagtggtgctggcactgggcggttatgggctgtttggtgtcgagctgtttgtctgtggtgatgaggtgattttcagtgaagtctcccctcgcccgcatgacaccgggatggtgacgctaatttctcaggatctctcggagtttgccctgcatgtacgtgccttcctcggacttccggttggcgggatccgccagtatggtcctgctgcttctgccgttatcctgccgcaactgaccagtcagaatgtcacgtttgataatgtgcagaatgccgtaggcgcagatttgcagattcgtttatttggtaagccggaaattgatggcagccgtcgtctgggggtagcactggctactgcagagagtgttgttgacgccattgaacgcgcgaagcacgccgccggacaggtaaaagtacagggttaaacccggcaaaaaaacgctacaaaaatgcccgatcctcgatcgggcattttgacttttacagcttagcgccttctacagcttcgcgcgccagcttagtaatgcggtcgtaatcgcccgcttccagcgcatctgccggaaccagccaggaaccaccgatgcacagcacgcttttcagcgccaggtagtcacggtagttagccggagaaataccacctgtcgggcagaaacggacctgagagaacggacccgcgatcgcctgcagggctttcacaccgccgttagcttcagccgggaagaatttgaactctttcaaaccgtagtccatacccagcatcagttcggaaacagtgctgatccccggaatcagaggaatagtcccttcggtagcagctttcagcagcggctcggtcagacccgggctaattgcaaactgtgcacctgcttcagtgacttctgccagctgctgtggattcagcaccgtaccggcacccacaatcgcttcaggcacttctttggcgatagcacggatagcgtcaactgcgcactcggtacgcagagtcacttccagaacgcgcaccccaccagcaaccaacgcttttgccatcggcaccgcgtgttccagtttttttaccacgataaccggtacaaccgggccggtggtcaggattgattctgcacttgttttccagtttttcatcagagttttctctcgcctgattacaaatttgtcgtcttaaaaagtgatacaggttgcgccctgttcggcaccggacagtttttcacgcaaggcgctgaataattcacgtcctgttcccacgcgtgacgcgctcaggtcaggaatgtgcggttcgcgagcagccagttccgcttcgtctaccagcagcgtcagttcgcctgtctgtccattcacacgaatgatgtccccgtcgcgcacttttgccagcagcccgccatcgtaggcttctggtgttacgtggatagctgacggcactttacctgaagcgccggagagtcgtccatcggtaactaacgcaattttgaaacaccggtccaataatacaccaagtggcggcatgagtttatgtaattctggcattccgttcgcttttggcccctgatgacggacaacaacgacacaatcgcggtccagtaaacccgcttcaaaggccggcataacgtcatgctggctttcaaaaacaaccgctggcgcttcaatcacctggttctctaccggcacggcagaggttttcataaccgctcggcccaggttaccgcttaacacttttgtcccaccatgatgagagaaaggttgttcgaaggacgcgatcacattgttgtcgagtgatttttctgccccttcccgccagtccagttcaccattattcagccatggttcaagggtataacgagacagaccaaagcctgccaccgtattgacatcttcatgcagcaggcctgctttgagcagttcacgtaccagaaccggtacgccacctgccgcctggaagtggttaatatcggccggaccgttcgggtagagacgtgccatcagcggtacaacatcagaaaggtcagagaagtcatcccagttaatctgaataccggctgcgcgcgccatcgccaccaggtgcatggtgtggttagtggaaccaccggtcgccagcagtgcaacgataccgttcaccaccactttctcatcgatcatcttaccgatcggcatccattcattaccattaccggtcatgcgcgtaacctggcgcgcagctgcagcggtcaaagcatcgcgcagcggagaatccggatgaacaaaagaagagcctggcaactgcatccccataaactccaccaccatctggttggtgttggcagtaccgtagaaagtacatgttcccggcgcatgataagacgcggcttctgactccagtaatgccatgcggtccactttaccttcggcataaagctggcgaatacgcactttttctttatttggcaaaccgcttgccatcggtccagacggcacaaacaccgcaggcaaatgaccaaacgacagggctgccatggtcagacctgggacaatcttgtcgcacacaccgagaaacagagcaccatcaaacatgttatgggacagccccaccgccgcagacatcgcaatcacttcgcggcttaacagcgacaattccattccatcctgcccctgggtgacaccatcacacatcgccggaacaccgcccgcaacctgaccaaccgcattcgcttcatgcagggctttacgaatgatttccggatagtgttcataaggctggtgagcggagagcatgtcgttataggaggtgatgatggcgatattgttacgcaacatgcttttcaaagaggctttgtcttctggctggcaggcagcgaaaccgtgtgccaggttaccgcatgccaactgcgaacgatgaacggtcgaggttttcgcttgttctatccgggcgaggtaagcagagcgagtctcgcgcgaacgttcaatgattcgatttgttacgcgtaacaattgtggattcataaaggctcctgaaattgagttgtcagagcaggatgattcacaacacgtttcattcagaggattcatgactgaaacgcctgtaaccggagctcatagggcaaaaacgtttcagtcagtgtaataaaaaaagcctcgtgggtgaatccgcacgaggcctgaaagtgtaaaaattgttctacaatctgtgcaagatcatgttaccggtaaaataaccataaaggataagcccagatattactcaaactcattccaggaacgaccgtcacgggtaatcatcgccaccgaggcaacggggccccaggttccggcctgatacggtttcggcgcatcattgtccatcgcccacgcctcagtaatggagtctacccatttccaggcttcttccacttcatcacgacgtacaaacagtgcctgaataccacgcatggtttccagcagcagacgttcataggcatctgccagatgcgtttgattaaaagtttctgaatagctcagatccagcttggtgatttgcaggttatgtttgtggtcaaggccaggaactttattcagtacctggatatccacgccttcatcaggttgcagacggatagtcagtttattctgcggcagatcctgccacgactctttaaacagattcagttcaggtgttttgaaatagaccacgacttcagaacatttggtcggtagacgtttaccagtacgcaggtagaatggcacaccggcccagcgccagttatcaatgtcgacgcggatcgccacgaaggtttctgtattgctgctcttgttcgcgccctcttcttccagatagcccggcacttttttgccctgagcgaagcccgcagtatattgcccgcgtacggttttttcgcgcacgttggagcggtcgatgcggcgcagagacttcagtactttcactttttcatcgcggatgctgtctgcgctcaggtcagacggcggagacatcgcaatcatgcaaagaatttgcagcaggtggttctggatcatgtcgcgcatctgaccggctttatcaaaatagccccagcgcccttcgatccccacttcttctgccacggtaatctcaacatgatcaatggtgcgattgtcccagttgttcacaaacagagagttagcaaaacgcagcgccaacaggttcagcactgtttctttaccaagatagtggtcgatacggtaaacctggcactcctcgaagtattcgccaacctgatcgttgatttcctgcgaggtcgccagcgacgtccccagcggtttctccatgactacgcgtgccggtttagcattcagttttgcctcaccaagccctttgcaaattgcgccaaaagtgctgggcggcatggcaaagtagttaatggtgatacgatttttttgatccagcatcgcgccgagacggctgaatgcagcagtgtcattgacatcaagattacaaaaatccagacgtgcactcagggtgtcccataaaccttcatcaatggtttctttcatgaaagtttcgagcgcctcgcggacaactttggtataagccgctttatcccagtcagcacgccctacgccgataatccgggtgtccgggttgagctgaccggctttttccagttgatacagggaaggcagcaatttacgacgcgcaaggtcgcctttcgcgccgaaaatgaccaggtcacaggcctgggctgtttgcgttaccgccatgtcattctccttaagttaactaacccggtacttaagccagggtatacttgtaattttcttacggtgcactgtactgcttttacgagcttgcgaaaactgtaaacgcttatccacccgtgcgattacggtaaaagcgcgcaaagtgcggcaaaactgataaaaaaatcatcgttttccattgggtaaaaatctgacactgatcatgttatgaaaaaaaataacaacttttttatctgcttttgtcattaacacagcacacaggcgtaatatctgacaaaactgcatttcgatttctttcagagcggaaatcgtcattacccgtgagtctctttacatcatgaatatgctggaaaaaatccagtctcagctggaacatttgagcaaatctgagcgcaaagttgccgaggtcattctggcttcgcccgataacgcgatccattcgagtattgctgctctggcgctggaagccaatgttagcgaaccgacggtgaatcgtttctgtcgcagcatggacacacgcggttttcctgattttaaacttcatctggcacaaagtctggcgaatggcactccctatgttaatcgcaacgtcaatgaagatgacagcgttgaatcatacacggggaaaatatttgagtccgcaatggcaacgctcgatcatgtccgtcattcactggataaatctgccatcaaccgcgccgtcgacttgctcactcaggcaaaaaaaatcgcctttttcggattaggttcttcagccgccgttgcccacgatgcgatgaataagttctttcgttttaatgttccggtggtgtactccgatgatatcgtgctgcaacgcatgagttgtatgaattgtagcgacggggacgtggtggtgctgatttctcacacgggaagaacaaaaaatctggtcgagctggcgcagctggcacgcgaaaacgacgctatggtaattgccctcacctctgcgggtaccccgctcgcccgggaagcaacgctggcaattactctcgacgtaccggaagatactgacatttatatgcccatggtttctcgacttgcacagctgaccgtgatagatgtgctggcgacaggatttactttgcggcgcggtacaaaattcagagataacttgaagcgggtcaaggaagcgctgaaggaatcgcgttttgataagcagttacttaatttaagtgacgatcgctaaaaacgactgtcactgtcctaatcttatacgacatccgaatgagattaatttatcgccatcgcggcgttatttcattcggatttcatgttcaagcaacacctggttgtttcagtcaacggagtattacatgtccagaaggcttcgcagaactaaaatcgttaccacgttaggcccggcaacagatcgcgataataaccttgaaaaagttatcgcggcgggtgccaacgttgtacgtatgaatttttctcacggctcgcctgaagatcacaaaatgcgcgcggataaagttcgtgagattgccgcaaaactggggcgtcatgtggctattctgggtgacctccaggggcccaaaatccgtgtatccacctttaaagaaggcaaagttttcctcaatattggggataaattcctgctcgacgccaacctgggtaaaggtgaaggcgacaaagaaaaagtcggtatcgactacaaaggcctgcctgctgacgttgtgcctggtgacatcctgctgctggacgatggtcgcgtccagttaaaagtactggaagtccagggcatgaaagtgttcaccgaagtgaccgtcggtggtcccctctccaacaataaaggtatcaacaaacttggcggcggtttgtcagctgaagcgctgaccgaaaaagacaaagcagacattaagactgcggcgttgattggcgtagattacctggctgtctccttcccacgctgcggcgaagatctgaactatgcccgtcgtctggcacgcgatgcaggatgtgatgcgaaaattgttgccaaggttgaacgtgcggaagccgtttgcagccaggaggcaatggatgacatcatcctcgcctctgacgtggtaatggttgctcgcggcgacctcggtgtggaaattggcgatccggaactggtcggcattcagaaagcgttgatccgtcgtgcgcgtcagcttaaccgcgcggtaatcacggcgacccagatgatggagtcaatgattactaacccgatgccgacgcgtgcagaagtcatggacgtagcaaacgccgttctggatggtactgacgctgtgatgctgtcggcagaaactgctgctggtcaatacccgtcagaaactgttgcagccatggcgcgcgtttgcctgggggcggaaaaaatcccgagcatcaacgtttctaaacaccgtctggacgttcagttcgacaatgtggaagaagctattgccatgtcagcaatgtacgcggctaaccacctgaaaggcgttacggcgatcatcaccatgaccgaatcgggtcgtaccgcgctgatgacctcccgtatcagctctggtctgccaattttcgccatgtcacgccatgaacgtacgctgaacctgactgctctctatcgcggcgttacgccggtgcactttgatagcgctaatgacggtgtagcagctgccagcgaagcggttaatctgctgcgtgataaaggttacttgatgtctggtgacctggtgattgtcacccagggcgacgtgatgagtaccgtgggttctactaataccacgcgtattttaacggtagagtaagtacgttgccggatgcggcgaaaacgcctcatccggcctacagttcaatgataattcaacagatttcgaatcttctgaagcaaacttgaacttatcatcagtcgaaggcctctcctcgcgagaggcattttttatttgatgggataaagatctttgcgcttatacggttggatttcgcccggtttgcgagttttcagcaattttaatatccaggtgtattgttctggtcgcggaccaacaaaaatctcgacttcttcattcatccgccgcgcaatcgtatgatcatccgcctctaacagatcatccatcggtgggcgcacctgaatcgtcagacgatgcgtcttgccatcataaatcggaaatagcggtacaacgcgcgcacggcacactttcatcaaacgaccaatcgcgggcaacgtcgctttataggtggcaaagaaatcaacaaattcgctgtgttctgggccatgatcctgatcgggtaaataatatccccagtaaccctgacgtaccgactggatgaatggtttaataccatcatttctcgcatgcagacgaccaccaaagcgacggcgcaccgtgttccagacataatcaaaaaccgggttgccctgattatggaacatcgctgccattttctgcccttgcgaggccatcagcatggcaggaatatcgacggcccaaccgtgcggcaccagaaaaatcactttctcgttattacgtcgtatctcttcgatgatctccagcccttgccagtcaacgcgcggctgaattttctccggcccgcgtattgccaactcagccatcattaccatcgcttgcggcgcggtggcaaacatctcatctacaatcgcttcgcgttcagcttcactacgttctggaaagcagagcgacagattgattaacgcacgacggcgtgagctttttcccagtcgtccggcaaaacgtcccagccgtgccagaatgggatcacggaactttggcggcgttaaagcgatacccgccatcgctgctacgcccagccatgctccccagtagcgcgggtggcgaaaggatttatcaaactcaggaatgtattcgctattattttttttcgtttccatgcttttccagtttcggataaggcaaaaatcaatctggtgatagtgtagcggcgcaacttgccccgcaccaaataaaaaagccggtactgactgcgtaccggctgcgaatggatgttaattaatcaaaccgtagctgcggcacaatctctttggcctgtgccaggaattcgcgacgatcggagccggtcagcccttcggtacgcggcagttttgccgtcagcgggtttacggcctgctggtttatccatacttcatagtgcagatgcggcccggttgaacgtccggtattaccggaaagcgcgatacggtcgccacgtttcaccttctgtcccggtttcaccaggatcttgcgcaagtgcatataacgcgtggtgtagctgcgaccatgacgaatagccacataataacctgctgcgccactacgtttggcaaccaccacttcaccgtcacccactgaaagcactggcgtaccttgtggcatggcaaaatcaacacctctgtgtggcgcaacgcgaccggtcaccggattagtacgacgcgggttaaagttagatgagatacggaactgtttcgccgtcgggaatcgcaagaatcctttcgccagaccagtaccgttacgatcgtagaatttgccatcttcagcgcggattgcgtaataatctttaccttctgaacgcaaacgtacgcccagcagctggctttgctcacgtttaccatcaagcatttctcgtgacattaacaccgcaaattcatcgccttttttcagtttgcggaaatccatttgccactgcatggctttaatcactgcgctcacttcggcgctggttaaaccggcgtttctggcgctggcaacaaagcttcccccgacggtacctttcagcagattgttgacccactctccttgctgcatttcgctggtcattttaaaaccgttagcggcagtacggtcataggttcgggtttcacgacgagacacttcccaggtgaggcgctgcagttcgccgtccgcggttaatgtccaggagagttgttgaccgattttcaggttacgcaattctttgtcggcagcagccagttgggtgatatcacccatatcaataccatactgattgagaatgctgcttagcgtatcgccagtggaaacaacatattcatgcacgcccgcttcaccggcgattttgtcatccagttcgtcctggggaatggcttcatcttcttgtgcagcttgatcaatcggctcactggcttcaggtaagagcgaacgaatttcgttctgttccagctcaatggttttgacaattggcgtggcatcgcggtgataaacatagggccgccagacagcgacggccagagtaagaacggtgagcgaccccaacataacgcggtgtggtcgcggtaaattattaaacgccagggcgacagagcgggctatctgttgcacgtaatcacttcctcattaatctcctttcaggcagctcgcatactggttggctaattgattcaggaattctgaatagcttgttttacccagtttgatattcgtccccaggggatccaacgttcccatacgaacggatgtccctcgtgcgacgctctcaacgaccgctggcctgaactgtggctcagcaaaaacgcaggttgctttttgctcaaccaactgtgttcttatttcatgtaaacgctgcgcgccaggttgaatctcagggttaacggtaaaatgaccaagcggtgtcagtccgaactgtttttcgaaatagccgtaagcatcgtgaaaaacgaaataacctttccccttgagcggcgcgagctcgttaccaacctgcttttcggttgaggctaattgtgcctcaaaatccttcaggttggcgtcaagtttggctcgactttgcggcataagttccactaattttccatggattgcaaccgctgtagcccgcgctatctctggggaaagccaaagatgcatgttgaaatcgccgtgatggtgatcttcgtcacttttttccgcgtggtcgtgatcatcatcatcgccgtgaatacttttcatcagcagcggtttcacattctctagctgcgcaatcgttacctgtttcgcttcaggtaatttacttaccggtttttgcatgaacgcttccatctccgggccaacccaaacgactaagtccgcgttctgtaagcgttttacatctgatggacgcagtgaataatcatgttctgaagccccgtcaggtagtaaaacctccgtttctgttaccccatcagcaatggcagaagcgatgaacccaacgggtttaagcgaagcgacaacggcagcatctgcggcctgtgttgcaccgccccagagagcggcggataatgctgcgaaaagaagcgtttttttatgtaacataatgcgaccaatcatcgtaatgaatatgagaagtgtgatattataacatttcatgactactgcaagactaaaattaacatgacaagtctggtttccctggaaaatgtctcggtttcttttggccaacgccgcgtcctctctgatgtgtcgctggaacttaaacctggaaaaattttgactttacttgggccaaacggcgcaggtaagtcgacactggtacgggtagtgctcgggctggtaacacccgatgaaggggttatcaagcgcaacggaaaactgcgcatcggctatgtaccgcagaagctgtatctcgacaccacgttgccactgaccgtaaaccgttttttacgcttacgccctggcacacataaagaagatattttgcctgcactgaaacgtgtccaggccgggcatctgattaacgcaccgatgcaaaagctctcgggtggcgaaacgcagcgtgtactgttagcgcgagcattgttaaatcgaccgcaattattagtgctggatgaacccactcagggcgtggatgtgaatggtcaggtggcgttatatgaccttattgaccaactgcgtcgcgaactggattgtggcgttttaatggtatctcacgatctgcatctggtaatggcaaaaaccgatgaagtgctttgcctgaatcaccacatttgttgttccggcacaccggaagttgtttccctgcatccggagtttatttctatgtttggtcctcgtggtgctgaacaactgggtatctatcgccatcatcataatcatcgtcacgatttacagggacgaattgttttgcgtcggggaaatgatcgctcatgattgaattattatttcccggttggttagccgggatcatgctcgcctgtgccgcgggtccgctgggttcgtttgtagtctggcgtcgtatgtcttatttcggtgatacgctggctcatgcctcattacttggcgtcgcgtttggtttgttgctggacgtgaatccattctatgcggtgattgccgttacgctgctgctggcgggcggtctggtatggctggagaagcgtccacagctggcgatcgacacgttattagggattatggcgcacagtgccctgtcgctgggcctggtggtcgttagtctgatgtctaatattcgtgttgatttgatggcttacctgttcggtgatttactggcagtgacgccagaagatctcatctctattgcgattggcgtggtcatcgtggtggctattttgttctggcaatggcgcaatttgctgtcgatgacgattagcccggatctggcgtttgttgatggtgtgaaattacagcgcgtgaaattgttgttgatgctggtgacggcattgacgattggtgtagcgatgaaattcgtcggcgcgttgattattacttcactgctgattattcctgctgctactgcacgtcgctttgcccgcacgccggaacagatggctggtgtcgctgttttggtggggatggtggcagtgactggcggtttaaccttttccgcattttacgatacacctgcaggcccgtcggtggtgctatgcgcggcactgttatttattatcagtatgatgaaaaagcaggccagctaatctgtcgctgaacacatttgtcggatgcggcgcgagcgccttatcccacctgcggttcgctatctctggtaggcctgataagacgcgaacagcgtcgcatcaggcacactgccagtgtcggatgcggctcgagcgaccaatccgacttacggcatttctggcggcgtgatgccgaagtggttccacgcccgcactgtcgccatacgcccgcgcggtgtacgctgcaaaaagccttgctgaatcaaataaggttccagtacatcctcaatggtttcacgttcttcgccaatggctgccgccaggttatccagacctaccggcccaccaaagaacttatcgattaccgccagcaacaatttgcggtccatataatcgaaaccttcagcatcgacattcaacatatccagcgcctgagcagcgatatctgccgagatggtgccatcgtgcttcacttcagcgaaatcacgcactcgacgcagcagacggttggcaatacgtggcgtaccgcgcgcacgacgagcaacttccagcgcgccgtcatcactcatctcaagccccataaagcgtgcgctgcgactgacgatatattgcagatccggcacctgataaaactccagacgttgcacaataccaaaacgatcgcgcaacggtgatgtcagcgaacctgcgcgcgtggttgcaccaatcagggtaaacggcggcaaatcaattttaatggagcgtgccgccggaccttcaccaatcatgatatccagttggtaatcttccattgccggatacaacacctcttccaccactggtgaaagacggtggatctcatcaataaacagtacatcgtgtggttcaaggttagtgagcattgctgccagatcgcccgccttttccagcaccggaccagaagtcgtgcgtaaattaacgcccatttcattggcgacaatattggcaagcgtagttttacccaaccccggaggaccaaaaatcaatagatgatcgagggcatcgccgcgcagtttcgctgctttgatgaaaatctccatctgcgaacgaacctgcggctgaccaacatactcttccagtaatttagggcgaatggcgcgatctgccacatcttccggcaaagtggtaccggcagaaatcagacggtctgcttcaatcatcctttacctcataacgcggcgcgtagggcttcgcgaattaatgtttcactgctggcgtcagggcgagcgattttgctcaccatgcggcttgcttcttgtggtttatagcccagtgccaccagcgcagcaaccgcttcctgttcagcatcgtcggtcgccgggctggcaggagacgtgagtaccaggtcggcggctggcgtaaagagatcgccatgcaaacctttaaatcggtctttcatttcgacaatcaagcgttcggcggtttttttgccaatacccggcagtttcaccagtgcccccacttcttcacgctcaacggcattaacgaactgctgcgctgacattccggagaggatcgccagcgccaacttcgggccgacgccgttggttttgatcaactctttgaacaacgtgcgctcttgtttattgttaaaaccgtacagcagttgcgcgtcttcacgcaccacaaagtgggtgaaaacgatcgcttcctgacccgcttcagggagttcataaaaacaggtcatcggcatatgcacttcatagcctacgccgcccacttcaattaacaccagcgggggttgtttttcaatgatgatgcctctgagtctgcctatcacatgacgctcctgcgtaatgaatcaaagataatgctgtatgataaaaaaatgctggatagatatccagcgaaggatgaagaaaacttgcgaggtgtctcgatgatctgaaaaatggcgcagtataatttattctacagattatattggaagcaaatatttaaatattacatattcagcgaagaaatgtgtaataaaaatacacattgcgacccctgaaaaaaataaattttttatgctattacgtatattcatatctatttcaatggaatgacaacgtgaatattaattatcctgctgaatatgaaattggtgatatcgtctttacatgtataagtgctgccttatttggtcaaatatcagctgcatcaaattgctggagtaatcacgtcgggatcattatcggtcataacggtgaagactttctggttgcagaaagccgtgttcccctctcaaccatcactacgctatcccgttttattaaacgctctgctaatcaacgctatgctataaagcgattagacgccggactaacagaacaacaaaatcaacgaattgttgaacaggttccttcccggctacgcaaaatttaccacaccggttttaaatacgaatcttcgcgccagttctgttcaaaatttgtttttgatatttataaagaggcgctatgtattccggtgggtgaaatagagacgtttggagaattgttaaatagcaatccaaatgcaaaactcactttctggaaattctggttcttaggttctattccgtgggagcgtaaaaccgtcacgccagccagtttgtggcatcatccgggtttggtgttgattcacgcggtgggagttgaaacgcctcagcctgaactgaccgaggcggtataacttaacgcagtcgccctctcgccaggttcagtcgcgattcgctcatttgcatcgcattctgactaacgtggcagtgggtgatggcaatcgccagcgcatcggcggcatccgcctgtggattagcgggcagtttcagcaaggtgcggaccatatgctgcacctggcttttttcggcactaccaatacctaccactgtttgctttacctgacgtgccgcatattcaaataccggcaattcctgattcaccgccgccacaatcgccacgccgcgcgcctgccccagtttcagggctgagtcagcgttcttcgccataaagacctgttcaatggcgaaataatcaggctggaattgggtgatgatttccgtcacgcccgcatagatgagcttcagacgagacggtaaatcatccactttggtgcgtatgcatccgctacccaggtaggacagttgcctgcctacctggcggatgacgccatagccggtcacgcgcgaacccgggtcaatgccgagaataatagccatcacgcgtctccgttttgctgtttagcaggcctcatcagagagtcgctgcaacctcatcagagatttcaccgttatggtaaacttcctgcacgtcgtcgcaatcttccagcatatcgatcagacgcatcagtttcggtgcggtttctgcatccatatcagctttggtggacgggatcatggaaacttccgcgctgtctgctttcagacctgccgcttccagagcgtcgcgtactttgcccatttcttcccatgcagtgtagacatcaatcgcgccgtcatcataggtcacaacgtcttcagcaccggcttccagggctgcttccatgatggtgtcttcatcgcctttctcgaaggagatcacgccttttttgctgaacaaataagctacggaaccatcagtaccgaggttaccgccacatttgctgaatgcatgacgcacttcagcaacggtacggttgcggttgtcagacagacattcaatcatgattgccgtgccgccaggaccgtaaccttcgtagatgatggtttccatgtttgcatcatcatcaccgcccacacctcgtgcaattgcgcggttcagagtgtcacgggtcatgttgttagacagtgctttatcaattgctgcacgcaaacgcgggttagcgtccggatcaccaccgcccagcttagccgcggttaccagctcacgaatgattttagtgaagattttaccgcgcttagcatcctgcgcagctttacgatgtctggtgttggcccatttactatgacctgccataaaaatatctccagatagccctgcctgttcaggcagcgttaattacaaactgttcaatcgcctgccggttgctccaggacttagtgagcgccgccgcagcagacgcatcaagccacttgtaagccagatgttcagtgaaaacgatctggcgctcgtgcggaagcgcaagacagaaccatgattccgtattacgcgtcacgcccggcgcatagcgatgacgtaaatgtgaaaaaatttcaaactctaccgtgcgctgacagtcaattaaggtcagttgttcagcgacaacatcaatggtgacctcttcctttacttcgcgcatggcagcttgcggcgcggtttcaccctcttccacgctgccggttaccgactgccagaaatcgggatcgtcacgccgctgcaacatcagcacccgtttcgtatcttgtgcgtagatgaccactaagatcgaaacgggacgcttataagccatatcagttattctcagccttcttcacaacctgaatgctcagctcagccagtgcagtcgggttagcaaagctcggcgcttcagtcatcaaacacgctgccgccgtggttttcgggaaggcgataacgtcacggatattgtcggtgccggtcagcagcatcgtcagacggtcaagaccgaatgccaaacctgcgtgcggcggagtaccgtatttcagggcgtcgagcaggaagccgaatttctcgcgctgttcctcttcgttgatacccagaataccaaacaccgtctgctgcatatcaccattatggatacgcacagaaccaccgcccacttcgtaaccattgatgaccatatcgtaagcgttagccaccgcattttccggtgcagctttcagttctgctgccgtcatgtctttcggtgaggtgaacggatggtgcattgctgtcaggccgccttcaccgtcgtcttcaaacatcgggaagtcgataacccacagcggtgcccatttgctttcgtcggtcagaccaaggtctttacccactttcaggcgcagtgcgcccatcgcgtcggcaacaattttcttgttgtcggcaccgaagaaaatcatatcgccatcttgcgcgccagtacgctccaggatggcttcgatgatttctgcattaaggaacttcgctaccgggctattgataccttccagacctttcgcgcgttcgttaactttgatgtaagccagacctttcgcgccgtagattttaacgaagttaccgtattcgtcgatctgcttacgggtcaacgatgcgccgcccggaacacgcagagcggcaacacggcctttcggatcgttcgccggacctgcaaatactgcaaactcaacagatttcagcagatcggcaacgtcggtcagttccatcgggttacgcagatccggtttatcagaaccataacggcgttctgcttctgcaaaggtcattaccgggaaatcgcccagatccacgcccttcacttccagccacagatgacgcaccagcgcttccatcacttcacgcacttgcggcgcggtcatgaaagaagtttccacatcgatctgagtaaattcaggctgacggtcagcacgcaggtcttcgtcacggaagcatttaacgatctgatagtagcggtcaaagccggacatcatcagtagctgtttgaacaactgcggggattgcggcagcgcgtagaatttacctttgtgcacacgagaaggcaccaggtagtcacgcgcgccttcaggcgtggctttggtcagcatcggagtttcgatgtcgaggaagccgtggtcatccataaaacggcgcaccaggctggtgattttagcgcgggttttcaggcgctgagccatttccgggcgacgcaggtcgaggtagcggtatttcagacgcgcttcttcggtgttgacgtggttagagtcaagcggcagaacatctgcacggttgatgatagtcagcgaggacgccagtacttcgatttcgccagtcgccatatcgcggttaatatttttttcgtcacgcgcacgtacggtgcccgtgacctgaatgcagaactcattacgcagttcagaggccagctttaacgcgtccgcacgatccggatcgaaaaatacctgcacgataccttcgcggtcgcgcatatcgatgaagatcaggctaccaagatcacgacgacggttgacccaaccacacagagtcacctgctgccccacgtgggacaaacggagctgtccacaatattctgtacgcatgagatatcccttaacttagctgccggcggatgccccctgctgcgcaggtgaccaagtcgcagcgttagctgtatgtcacaactgaatgaaaaaaggcggctattatactggaaattctgccgcaccgtaagagcctggcccgcgctggaacgcctcgttaccactttatatcgggcctgaaatcagactctacgccagtttgctataaaggtgttgcccgaactcataaaaattaacaaaatttgtcgttccgccatcggctaatcgcattaaggtgagaggcacgattttgttttgtcaggagtcatcatgcttgaacttaatgctaaaaccaccgcgctggtggtgattgatttacaagaaggcatcttgccttttgccggaggtccacatactgccgatgaggtggttaatcgcgccgggaagctggcggcgaaatttcgcgccagcggtcagcccgtgtttctggtgcgcgttggctggtctgccgattacgccgaagcattaaaacagccggttgatgccccctcccccgcaaaagtgttgcccgaaaactggtggcaacatcctgctgcattaggtgcaaccgacagcgatatcgaaatcatcaaacgtcaatggggtgcgttttacggtacggatctggagttgcaattacgccgccggggtatcgatacaatagtgttatgtgggatctcgaccaatatcggtgttgaatccaccgcccgcaatgcctgggaactcggttttaatctggtgattgccgaagatgcctgtagcgccgctagcgccgagcagcacaataacagcattaatcatatctacccgcgcatcgcccgtgtgcgtagcgttgaagagatcctcaacgcgttatgatttacatcggtttgccacaatggtcgcatcctaaatgggtgcggttggggatcaccagccttgaagagtatgcccgccactttaactgcgtgacgcgggcattttaaaaatcactaaagaacgcccaagagcatgtgttttctttagtttattcaatgcattaaaaaatagtttcgcatgaaattcggtaaacttcatgtgtgcaataatgtcccattcatgccccaaaatgccccaaagcagacatttttgccccaagtatgccccacaagtcacgtcttcaagtcgtctatatccatagcacaccgagttacattcttgcatccggggtgtcgacaatacctactttattgagtgtgcgagaattaccaggaacctttccacaatgtagtagtctaatagtcgaatccatctaacattaagaagcgttatgatcactagcctctcattgatatcttctgtaatagtcactctatgtatcatggtgttcgctacagtaaaggtagggattggtttgtctaacaatccagacagaaatgataattaacctcaaccacgtaaccacacttcatacttcatacttcacttaacagtgaagtgctcacatcaccgggcagtcatcaaactccgcattcctggcatcattaatgatgtacgtgatcactccaaatatagcgggtgcagaactgtaaccatcatcatctgctggcagcgcttcccttctcccgttatccagattaaccaggtgcggctgaggatgagtccgatatcgcttgatcctgaattccccgtcgattgcacatatcagcagtgaaccatcgcaggcagtaagtgacgcatccacaacaagcaacgctccctggattatcccttccctgaaatgtgaacgcgatgcccgcatgaaataagtcgctgcgggctgactgattagctgctgatcgagggagattcgtgtttcaacataatctgccgcaggtgaaggaaatcccatgtttacgccctctcttgaataccggataaaaacacagtataaatactgtatatccatccagcaaagaggcaatgagcaatgttcgtggaactcgtttatgacaaaaggaattttgatggtctgcccggtgcaaaagatatcattctgggcgagttaactaagagagttcaccggatcttccccgatgctgatgttcgggttaaaccgatgatgacactgccggcgatcaacactgacgccagcaagcatgagaaggaacagataagccgtactgttcaggaaatgtttgaagaggctgaattctggttagtgagtgagtaaagattttcaatgcccgccacagttacgtattgattatgctgtggaggatattcattttcgtaaacgttggtttgggagaagcggcaaaacggaatgtgggaacaggggaaaatcagataccagatatgtctgcatttccatctggcaataactggtttcagttaccaagtggacatatcgttcagatattttccatgaacgttcttggtgcagatgctaatggcacgtcagctaattaccccattgcttttccaacaacgatgattgctgtcagtgctctatggtctgatgggactgtagcaaatgcaccgacatacaagatgatggggaacacgactaacagaacaactttgacgataaaagtatcagccagctcaggtacttacgggacaatgattattgcggtgggacgataatatgaataaatacagttactctccttcagaaaatgccttttatgctgttgcgttaaaaaatacctatgaattgagtggcacatggccagctgatgcattagatattcctgatgacatttctgtaaaatatatggcggaaccgccacaagggaaaatccgagttgcaggggaaaatggttttcccacatgggctgaaatacctccaccatcacatgaggaacttattgaacaggccgaatcagagaggcaattattgattaaccaggccaacgaatacatgaacagtaaacaatggcccggtaaagccgctattggtcgtctgaaaggcgaggaactggcacaatataattcgtggctggattatctggacgcactggaactggtcgatacttccggtacgcccgatattgaatggcctacgcctccggcagttcaggccagatgacatccggcgcggtgctggtatctgttgcagtcaccgcgtcaatgtaatccagcacggcgttaagtcgggttgtttctgcctgagtcagtttccgtccggcctgtaatttcagctgaatcagactaatggaagccattgctgcatcaatcagtgattggcgctgtgcttctgccgcttctactgaggcaccgtgttgtgcctcagtatctgtcacccatttctcaccatcccatttatcatatggcgttaacggtgaaagcgtgacataaccgtttttgatggcaccgatataatccactgtaacagctgcgccattttcgattgagtaaacagtctcattgcgatggtcttcctcatggctccatcccttacctgtaaatactgccactcttcccggaatgttttcgtccgggtcaataccagtggaacaggcgggcatacttacgccagtattaatatattcatcagaccagcccgtatattcagacgttactgcatcataataaaaacaacgcatatcacccggcactgcagccagcccattttcatcaaaaacaggtttcattatttagccctcaccagaaagttaaatgcaatatttcgcggtctgacagcaacaaaattcacaccatcacccacagagttactgttgaaattaaatcgtgaaaatcctggctgatttccggcgatgccatcatgaaagttaattgcgtgtccagcacctccgcctatattcccggcaaactgagaaaagtttgtagcttcctgccagcttaataattcgcgaccaccatctgcacctcgcccgtcatcccagacacgaatgaaatcaccgcgggcttcaggtaataccagcgaaggaaacactttcgccagcacaggataatcagtggcagagaatttcgcgccgttgaacttcaaaaacaccatactggaccagctgtcgattacagtatttggcattgcagcggacggccagaagaacggaacgccaatagctggagaaccttctcccaaaccaaggtttgtgcgagcgtctgcggcattcgttgcgccggttccgccgtctgcgacagtaaccgcaccgttgctccctttctgcgcaagtttaccgatgcctgggatggttacggcggtgccgttgatggtaactgtgatgctttggtttgctgaggtggtggcgaacgtctcccacgcgccaatattctcgtcgtactctttgatgagctgtgacatggcctgcgccaggccgtcgactgagatattgtccgacacaaggattccatacttctggccgctcagcgccggggaaactgctggcgtaaccgtcattgacgtggcgctgttcacggatgaaatctgaaacagctgcaccgggttagacatcacgataatcgtctggccagcgcggacctggctggcgggagctgtccagtttgtgccggagccggttgcggtatttccgttaatagagatagttccggtgctataaatcataacaactcctaaatttagacaacatgaagcccggagaggtatataaccctcaccagaaataatttctgaattggtttttaatacatgttgggcaacgccagtgttggcatagctatagttgtatcaaatgccattgaccacccacccaaataataattgccgactactttattcctttctgctctgacattcccacctgtcattacaattcctttatacctaatatttccgtaaccaccaacgtgtcgacagttagccccggtataaacaatctggcaaaattcatcaccaatattcaggttcgcattggcgatatttattgtcccatcaaaaatgaatggcttcgtgcaagtaagaagacgtttgcgttgacgattggtttattcaatccatcaactaaaatatcatgtaaacgaattgccataacatttcccactttattttacttactcaacacaacaagtatattaaaattgaaccttgtcaacaacacaaaggagtcccaatgaaactcgctctaattatgctgccattatgtctgtccctcactgcatgtggtaatggtttaaataccggtaaaccaaattccggtgtcattccaaaacctttggatcgagatggtaacggttctttaatttatgataccgaaaaccttccaatgacggggcagtggtgtcacgagattgatcacgaataccgacgaatcggtagcccttctaactgtgttatagactactaaatattaacccctcaaaagaggggttaatattttaacctgtgaatgaaccagatccgtgtgatactatgatagtaggcgaagaaattgacgcacccctgttattttgagcggacactttaatacgcactgttacgtttggacctgttacaaccgcagaatgcatgataagtctctccatgtcttgcacggatgaaccactctcattgccgttaatgtcgattgttcctgcaccattacctttaacgtttgctataacacagacgtgtcttgcgtgcccagaactggatgaatcattataagtcattaccttttctaaatatccgtcactagaccgactcacattcgtccctgtgtgcatatttgcaatgtccccgataaaactttgggcttccacagtccctttgaatttaccgcttgttgcttggatctcaccagtaaagctaccgccactagcatatactacacctctgacggtcacattgttgaattcagcatctccagctttattcaacttccaaccagcagaaccagctgcatagttgttggactggatatagttaccgatttttgcgttctcaatggtgccgtcctggatgaagctggcccggatgaatgtctgcccgttctggatcacgaacggcaaagctacgctatttccggctgccgtggtgacggcgaagcggtcagccaggaagataacctgcgactgcatgccggatggcgtattctccacgccgatacccatccccgcggcgtaatactgcccgttgctggagacaccaaccttgatgttgtacatcgcgctgagttcgccattaacgttggctatagcctgagcgttagtggtgatggcggaggtatgcccgttcacggtcgccgtgatgccgtttatctgcgtggcggtggcctgctgatagtcggagagcgtctgattcaggctgttgatggatgccttgttgccgttgacgtccgtctgcaggctcagcaatgaacgtgctgtggcttccttctcactgacgatcacctcgtcgagacggtccagattcgcgctgttgccggcgaccgatgcagaaagggttttacgcgtggccacctgagcgaggttggcctggattatcgcaattgcagagttcttcaccccgcccgtcatgccgtccatagaaacgctgatgttgtcgattcgctggcccagggcggtatcagccgtcgcaacggtctgctcaagctgactgagtgaagacgaaacattcccgaccgtgctggaaagctcattaacgctggtctgaaccttcccgacgtcctgggcatttttggcgatatctttcgcttgctgctccagttcgtcgttggcctgtttgatatcgttagccatgccagcaattttttcgttgctgtccaccgcgttctcgatcaggtctttgaacgtttccgactctttcatatcctccagaatgtcattagttatttcgctgacatctatcgaggacgtgcccatgatccagtcggtccagtccccggcgttaccgatacggtcaatcaggcgcgcgcggtaccactggcgaacgccggcaggcatggggccatgctgataatctgcagccgggtacggcaccaggaccagcagttcaggattggcgtagtcggcagttgtggcgcgctgaatctctgtataggccgtgtcgcctgagccatccggaaatttccaggtcaggtcgatatgccagaccacatcttcggtcgccaggaagttgagcggagtacccggttttcccgttttaccggagagataagttgtttcaccgtatccccatggtgacgacgtatcctgcgcattcagcgcccgtacgcgcacgtcatagctgcccgaataaatgccctgaaccgagaaaccctgcgcgctggtaaccggaacgtttatccagtccccgttgtccttacgccactgggcaacataccggattgcgccctctaccttatcccatgacacgtccaggcttgctacagtcagcccctgagacacatgatcgctctcagtcaccacgatattcttcggagcagacaggacgcttatcggcgtgacggtgatcgggggagactcgacccgaacgccgtcatcgatgtaacgatatttgtttggatcgtgctgaacggccgtaatagtgaaaccgcctgtactgtcgtcgttagccgcgattgaggtgaccctgaagtactgtattgcgaggttatcactgtctatcgcccaaacagcgcccgccacaggaacctgactgaatgccgtagccaccgtcaccgtttttttatcggcgctcaccgcgctgattgtccgcgtctgggcttttccgtcgggaaggttaaccaccagccggtctttcgccgcgtagtctatttctcgatcgagggtaatttggcggccgttggccgcgcttatacggcccccgttctccttaccagagcggaaaggatcggcgacaccgataatttcagcgggcaaagggatataaccgtccagccccacgccaaacgatacggtcccgtctttggcattggagagcaatacccagcgaccgcgtcggtgcgcttcactttgcgaggtgcagccgattgcggtcagggacgtctgccggacgtcgtaacgttctacaagcgccgaatcgtaaaccccctcaacggtatcgctgtaatggttctgcggatcggaccaggacaccaggcaggagctgtagcgattcttgtatgagccgcccgcataagtaaacagcccatcgataacgtttgagacgttataaacccagtcaacatcgtcctgcgggacgtctgcctggacataaatctgatcgtttccccagaacgttattccacgaaataccgcggcgagatcgttaagtacctgccaggcgtcctcctggctctgaatgaaaacgttgcaggtgaaacgcggttcggtgccaccggccccgtcggaaaccatttcgtcacagtactgggcgattgaatacagcgcccacttatccaccatggacgcatccacgcgcgtgcccatgccgtaaatttcatccagaaccagatcgtaaaagatccaggcagggttattggaccatgccattttgaacccgccggaccatgaaccagaataggttcgggttttcggatcgtaattatccggaaccttaatcagcttgccttttatcttacaggtcactttcggcgcgctgccgttgaattggctgctgtccacttcgacatacaggagcgctgttaaaggataacgaagcttgctgtcgatgacttccgcatacgaaaacaccttgaaggcgttaaccagtttcgaatttgatccgctggcatcagccgtaatacgcctgaccctgacagaccagccggacgtggattttggcagatcgatacggtggtcacgctgatattccgtcgtggtctttccgtcaaacttgccgtttacaaccgttttccaggcgccgccgtccgttgataaatcgatcgcatactcggtgaccgtgcccaccatatcgccattatctttatagagatactggaccggaaggctgagcttgatacggatggcatccagggaaaggtttgtaaactggcgcgtccagggcgcggtggtggtgacagttgtgcccacggccagctcgttgtcgacctggggcatcccggcaatataggtctggtcctgtgtgcccttgcggaactcccatttcacgccgctgaagttgtattccccgctgtcgtttgccagcggcgtatcgttgagaaaaatgttctgagcggtcaggtcgccctgtatttccccctcagaaacggcaatgagcatttttaattttgcgaccgacagcagatcgtcaggctgctcaaccggagtatgtgaactgccacctccccctttggcaccctgcaggatggtttcttgtttaagaagctgcattttttcacccataaaaaaaggtgccgaagcacctttaagttagtggccgctggcctactgctgatcgctcgagtacataccggcgctgactatcgctccccctgcctcagtcagaccgtaggccagggggacaggatgccccatagcgacggtattgaccggcgccccgaaggcgtagttaggcgtgttgtccgtgctggaggatttacccgcgccgaaggatggctggggcgtgagcatctggacaacgccccccagcatcatcgacactccgacccctgtcagaattgacgtggcgctgatagctgttgcactcatcgccgcgccccaggctgccatgctcgcaccagcggtaaagaatgcagcgaccagcgcaacagccccgacaactatctgcaggacgcccgaacttttggccccctcataaacgggcacgatccggtacacgcttccaccgcgggtcatatcaaactcttccagcccgatattgttgccaccgttaaaaaaggcgaaacggatccccttcatatgagcttcagacatatattttttgaatccgggaacctgtgaacacatggccctgagcatctcgcgcaggtcggcaacatcaaactgaacgcgtttaccgaatttttttgccattttaccttcgagaataagcgtcttaaccatgcattctgtccttatgcctgaccacccggaccgttctgtcgcgataatattttccataaggcgttcgcgaagaaaggtgcccgaaaagatgatggagaatgatgttatcacccacatataccgcggcgtgattagtcaccgatgcctgcacactcatcatgatgatatctccgggctgcattgcaccggcggcaatctcaacgaatccctcacgctcccagttgtcgtcgtagagacgctccttgccgctctcccaccattcgtaaggtactgaataattgccgagaacaatgccgtattcgcgcagataaaattcacggataagcgaccagcagtcggcgtaacccagcacccactgccgcccggcataatcccggtcttcacgcggggaaatcgtacaaaaatccccgtccggccaggacatgatcccccactcaatccccgaccagtcgcactggatccggtccagctctgagggcaccagccgaaccacatccggatgggaatgaatgagcatgatgatctcaccgcgcgcgcgggcagcgagctggtcttccggggagagcgtgaatgtctcctcgggtttatcggcaatgttgcggcagggaataaagatttgttgctggcctgactgaacaatcaggccgcaggcttctttggggtattcagcagcgacgtgctgacggatagcatccagcaatttttcacgcatttttatttcccctgcaggtttgcagccggaaaaccgccgaacggcagcggcgcatccgggccgtgacgatcctgacaatcctgccggcggccgccacaaacatctttcgacgggtcatcggtcggtgtaccgtctttggtaaagtatttcgtgccgttgtaatcgcatccggtcccgcttcggtaccagccccgcatacaccaggtgcagacaggcgtaatctgccgtgtcggcagctgcaggctctgaatatcgaaaggagaacacagctcgaaatcaacctgtacccgcgtctctgcggttttagcattgacgtaaaagagctgtaagcgctcatcggccgggctggcacccggattaccgtttttccagttggcggcatcgagatacttcgaaagcgtggtatggattttgaccttagccctgaccatatcgtcatattcaagacacagcgcggtgacatagtttccgacgttcccgacggacagcgtgggcgttggctgggaacctgtactcgataactccatccccttaagttcgtagggatggggatcgtactggtttccctgccagataatggcgggcagattttctgcggcgaaggctgcccacccctcttcctgaatattgtgcgcatgaaaacgcagcacctgatccataccgaattcagtgccgtcgatctcaatcagctgaataacgctgccgggctcaagctgttgtatgtctgccgtaaaactcatactccccccataaaaaaaagccgcccggaggcagctttcagtgtttttcgagaaaatcagggcgcgaacgcctgttcaaaagtgaaggccacagtggcttttttcccggtagggaaagaaacgctgaacgaatcggccttcattctgaacagctttttttcaccccatggagtggtccaccagaacgatttagtaacgtgagacatcaggaaagcgcgcagcgcagccgcctcctgtctggtgcccgtccagtccaggttccacgtttcctgtttgtcgttgatccccatccccgctatctgtttgtagccatccccgaactgggcctgcagcgttcgggctgtttcagtgccctgcgctgtttttcgcgtgcgccaggtaaacgtgtccgtcactgtgtcctcctcgaataaagcacgccgcccgcggacatttcttttttcagtcgctcggtgattgtctgctgaacaatcgcctgcagctgtttcgccgtccccgtggcgttcgcctgatttatgcttccgtcactcccctgctggctgatgctgactggggcataaacactgatcccgcccatgccagcaccggctgcgttcccgccgccgaccagaccacccgaggcatacccgcgcatcaggcgatagagattagccacgccgatgcggctggttgattctttggtgaagacgaattccccgcggtgaacgataccggctggctcgtacttgccgccgtgcccggtaaaaccgcccacgtcaaaaccctgtggccggtatgacgggaccgcgaatgactgaccggcagaggaggttttcgccccgccgctaacccagcccattgcactctggatggtgtaagccaccagcagctggttgataacggacacaatcattttaaggatcgagctggtgaattccctgaagctcgccttcccggttgtcgtcaggctggtaagctggcccgccaacccgctgaacgtagcctgagaaatctgctgaacggagctgaaaacgtttgtcgctgaatcctgatattcggcccaaccctgtttcgcaccggccagccagtttgcacgcagggcatcttcagcttcgaacgtcgccctttgctcttccagaaccttttgctgcgcctgagggttgtacgaatagctttcgctgagacgctgcagcgtagtttgtcgcccggcttcccgggtggataacccctcagactgagcctgcaggcccgccctggcggctttttgctgctgctcaaacttcacggcctgatcggccagctggttgagcttttgctggctggcaaccttatcgcccaggtcggccagctgccgcttgtactcgagcgtttcttctttgtgcgccagcagggatttttcctgcgccgtaagctgacgacgcccagcggcctcctgcagaacggtgaactgattttcagtttgccagagatcctgacgctgtttacttatgacgtcgttcacgctggtatgctgctcaagcgttttaagctgggcctgaagggtgagaagttcggcctgcgccttttcctcggctttgtccccggcgggcgttgagtagcttttgcctttcggtgtttttggatccttccactgcttttcaatcccggcgcgggccgcggcaatgtccttttcagtccacagcgtggcgacaccgtctttcgcatcctggcggtttttctcaataagctgactgagctttttctctgctgaagcccgcttttctgccgccgtcgcgccggactccaccagctggttaaactgctgctggctgcggattgcctgagcctgctggtccgttcgcattttttcccgcgcggctgccagcccttcctgggcgtattgctgatcggcaagatcgtaagcctgctttttcagctccacctgctggcgcgcgtttctcagcctttccgcatccgctttctgcagaacgttgttaccggcataatccgggtcgaccttaagattgctggacagcgcgcggtactctttctctgctgcctgccactcagcaaaagagtcctggcgcttcatcgcggtgtcaggattacgcccgacgcccagcatcgcatcccacgcaccggaggcggcattcttcacccagttccaggctttttcgagggatccgagattatcctcgaccgcaccggcgcgctgaatgaccgcgtcggaatatgcccgcatggccagctcggcagccttctgagaatcccccagcgcctgagcagaagctatctgttcatactgggtggctgtcagaaaatgaagggaatcgttgagcgtcgcgaccgcgttaaccggatcatccttcaggcgtttaaactgatttatggtttcgtcaacggcctgcccggtagcctgctgcagcctggcggcaacattgctgaccatgctgacgtcattaccgctgaacgcgccgctgccaacgacctgcgccagcacgcctgcagcggcatgctgagtgatgccattacctgccagcgagcgcgccagcgcctgcagctgccctgacgttttccccgcgtagttcccggtcaggatcagctgcctgttaaattcctcagactctttgctgccgtcgtaccaggccttacccaacccgaataccgccgcggcaatccctccgaccatgctggcgatcccaagaccgcgcagtgacagaagctggtctatccaccctgcccggttagccagcgtgatcccggagccgcgcagcgcgccgaagttaccgcgcatgacctcgccgatcagtattcccagttcctgccgggcggcggcactttgcagccccagaccgtgcgtggcgactttggcagcttcgagcttgcggatatagacttcagccgcatcgctggcaccgacctgcgccgccttcatgcgcagtagctcggtaccggagagcttttgctctgcaacctgttgcttcagctggctgaggaatcgcgtgcgcgctgcggccgatttttcctccacgatctgcagttctttttgacgggccgtggtgcgggaaataagggcgagataatcctgctgggttatgttgccctgtgccctcgctgcgcgaaagcgcgcctgcacgttcgcaagcgactgtgtttcaccattgagctggcgtacgccgtcgatctggcggaaaaatgatgccgcaagttcatcctgtcgacgggcaagcgcagcggcctgcccgtcattctcacgcatgcgctgattaagctcggtcacgcggcggtgagtttcatcaacggactttgaaacgttctgccagtctttggtaagcccttccgttgcggccgactggcgggatttcatatctgcggcagccgccgcgccagcgtcacccacggttttaaacgcagccgcctgccgctctgaagcgcgctgcattcgcgtctggactttttcagagtcctcagccatcccggttagctggccctttatgcgggcaacctgctcactaaacgtggcgctgtcgacgtcaaggttgatgaccagatcgctaatctgctgggccatatcggatacctcctgttatcccctcagctgcggccatcagcgcatcatcatccggctcgtcatcgctgatgacgataccggaaggagaaagcaggctgaaatgtgcgggggtaagttccgggtcgcggaagaaaagagtggagatggaataaagcagctctgagaaatgcgcatcgagctgagcgtcctgaaaataatgctcccggtagaactggtgccagtcgcccagctcagtggaagtcattccagccagcatggcgcgccagtcgggtcgcccgaactcgcgcgccagattcaggacaaacttcagctcgctggcaagggcttttccgccgcaacgggttctgcgctttcggcctccgctggggcatccggatcggcagctttgtcatcctcaaccggaacgagcatgccggagagcagctttatttccatttctgctttaccgatcgcctccggcggccagccgctaagcacctgctggtaaagcgtctccacatccgtgccagccggatcgttatgccacaaagacatcgcaatcaaacgcgcaccgcagcgaatatttgagccaatcagcctggccgtcatttcctgatcgctgatgccgtcgctgtcagcgctgacggccttttcctctgcggccataaacgtgatgtactcaatacgctgaagcgccgacagctcgaagatggtcagtgattctttttgccaggtgaacttctcttttttcagaaacatgcgtccttccttacgctgcagttacggtaactttgcagaccgcaacgaaattaccgtcgctggtcataacaataacgtcagcggtgcctgccgccacgccggtgacggtgatcgcattaccgctaacggtgaccgttgcttttgccccgtctgaggttgccacacggaacgaggtatctgaggcactggctgggttaaccgtcacattgagcgttgtggttgcgccgacggccacgcttgccgtggctttatcgagcgtaacgcctgtcacggggatattcggggtcccgctttcttctgccagttccggcttgccggtattggtaattttcgctgtacgggttatgacctcttttgccggaatggctttacccaggctgctgcaccagccgcggaaaacgtcgacggtaccgttcgggtatttgattttgtaatagcgtactgagccatcaataaaccatgcgacaaggtctttttgcccttcttcgcccggcttccaggcgagggtgaacgaggtatcgccagcagattttgccccctgggccgtcgcgttccagtcggcatcctcgtcgtcgaggtaagtgtcgtcatacgattcggcggtcatttcgcccggcgtcagctctttaattttcgccaggcggttccagtcgatatccgagagtgggttagcgaaagcgttgcccgttccggtgtaaagccagagggtggtaccggcacctttcacaggggccagcgggtttggagtaggcataagtacctcttaaattgaataggtgattaagtacgtgaaatcgactgaaccccaggtggccatttcatcatcccgctgatagtcataaccctgcggggtgaacgtctcgaccagttcggtcagacctgggatgaaggccattgccggatacactttctcttccatccaggaatcaagcgcgctgtcggggctggaggctttaagaaatacctcgatgtgaacaaccgcctgccacgaatcttcgtcaagcgaatcgccggtgtactccgcgtcagaaaggtatacagccacggcagggagatcctgctcttcaagaaaaacagggcgcccgtcaaaccaggtgaccgtgtcggtgatctcggctttcagtttggccagaatggctgcacgaattgcgctgtgtctgttcatcgcttcaggtggatcctcagttggtttttcagggctgcggaaagttctttgggcatatcgctttcaataaggcgctttgaaatagcggtgaaggccacggtgagcggtgtctcaagaggaactttgaccacatcaatcggataacgggcctgacctacgcgccgcatgacctgccagcgcccgttcgcaagctgttggataaaagcgttacgaaaggtatagggcccgattttaaggacgctgcccgctccgtttctggccccttttttacgcgagagcctgacgcgcgccgtgccgagctttatcgcaggaagattaccgcggttgatttttatcgacgcgaccgggcgatcgtgacgggccttgcgcagacgggaacgctggcggaccagacgaaccggaagcccctttttccggttatcatcaactgttgcttctttcgctacagctttgctcccctggcttatcgttcttctggccaccctgttaagtgcttttgcggttgcctcaggaacgattaaccggctgaggctgttcaggttctgaatagccctttccagtcctttcacagacatagcgcctcctcattcgagatggatgcggggttttccgttgaacatgtcatagcgggtaacgatcaggttcttaccgtcgtagtcgacgctgtcgtttcggcgtggctggtaaagctcagagaaaaccaccagcgaagtacctgttcccgacaatggccccatttcctcgagttgctcggcgggaacaacgtcatagctgctgccattgatgatcgctgtctttcccatcttttttatagtggccgcgtccatgcgcgccgccatccggtcaaaggagttaggcattgatcttaacttcaacaacggtggtgtttgcccctgcatcttcccaggcgatgcccgcggcaacggcgtccgtttcttcgatcgtgattttgccgtccttcagatacacctgcgccccggcagtaaccgcatctgcggatacttttggcaggaggaaaacaccctcagtaaaaccgtccccggtatcgccagccgggatatcggtaattgccaccgcgataagttttccaacaacaaccgggtcgccgctgtgaacatcggttgcaccactgtttaccagagggatcgttttcccgtcctgcgcatagttcttagccataacttctccattcagcccctttcgaggctggtttcaggtataaaaaaagcccttacgggcgtctgtttgtcaggactgttttttactgaccagaggatttggtcatgccgcgatagtccagcggcgccacgccagcatcaatacgcactttcgtggcgataccatcagtggtgaagccttcctgctgatcgatgtatggcgtgtcgacgccgttgagataagcgacctcaatggtgtcggtgcccttcgcggcagccagataccaggctttcgcatcagcttcatccagacgtggttcggcaatgacttctgcaaagttctggatagggttaacgatcccggcattgatgtctgcacctttaacactggccgacttgatggtctgatttgccagagtttccagggcgacgggcaccagcatgtaggccggacggatattcagggttcgctccccctccttctgcagacgcatcagcttgcgcgattcgtccaggctggccacagaaattgcacccgagctcaggttcttgtgatcggcatggaacagcgcctttccgtctgagagtttcgggtttttggtcagaatggcgtaaaccagatcgccaatcgttgctttcgccgcgcgccccatcttcatcggtacgtcggtaagctggttcagatcgtcgttgatgatcgcctggcgagttactgagaagatttcaccatacgtggcaagcgcgatggtttcgcctttgtcactggtagtgatgtacttgtactcagccccttcgcgaacctgtcgcagagaagggaacccacccataccgacacgatgcgccgttttgaagtccgacagctggccttttttggtccactgctcgaaggtttcctgcgcctcgtcccagccctgaatcagcgctttgttcgcaacatcaagcagaatgttgccaaagtcagaggtgctgtgggtcagcgccaggccaaccatctgcatcgggttgtagctggccacgccgatacctttttctgtcagggccatacgcgcatactcgcgcagcgtcataccgttataaacgttatcccgctcctgaccttcgaacccggcacgcgccatcagtgcctggcgaataccatccgcgacgaagttaccgttgcccgcatgaatatgcggctgagtggttttattggacggcgtggccgttttaccgagttctgccagcagcaaatctttcgccttatcgacggagcaatcagggtcggccacacactgattctgcagttccatgtgcttattaccgaacatggcaaagagatcgccgatagcgttaacacgggttttctgctcagccaacacctgcgcgcggatcgcattttcatccggtgccgggtctgtttttgcctgcggtgcctgaggctgggtaataaccgggtcacgctgggtagtgttgcgcggcggggtgatcatgttgcgaatgctttttggcattttttcaaattcctcaatacgttttgaatgaatacaggccatagcctgaagggatggtgtcacctggtcggcaaaacccagttcaaggcactcgctgccgttcatccaggtttcgtcctccagcattaccgcaatttcttcggtggattttccggttttctgtgcataagccgggataagaacggattcaaccttgtcgagaagatccgcatagtcgcgcatatcgctcgcgtcaccaccagcaaacccccagggcttatggatcatcatcatcgtgttttcaggcatgatgaccggattgcctaccatcgcaatcaccgaggccatggaggccgccagaccgtcgatatgtacggtaatcgccgcgccgtggtgcttcagcgcgttataaatagcaattccgtcgaagacatcaccaccgggcgagttgatataaaggttgatgtgggtgacgtccccaagtgcccggagatcattgacgaactgtttcgccgttacgccccagtacccgatttcgtcataaataaaaatgtcggcctcactgttattgctggcctgcatgcggaaccacgaattactttttgcgctggctttcggacggtggcgcgcccggttctttggcttcggcactggtgcctcctttatcattggcggggtcggtgtcaaacaccaggccctgttcacggttctcgtcaacctcagctttacggcgtgacttaacatcatccgggttgcgaccgctggcacgtatccagtcggattcagtagcagcaccgccgcggatctgcgttttccaggcattcgcttctttaacgggatcaatccacggcataacgggccccgaataaaccgcgttataaagcgagtccatatcaatgcctctcggcagcttgatttctccggcagcaatagccatcttgagccaggctcggtacatgggccgggtcactgaaccgatgaaccagtcctgaagaatcagatagccgtcggttgactcgacaagctcctgccgctgggcactgtacgttccgttgtagtttctggatgtgctggaaaagctgaggcgactgccggcggacacggcacgcagctgtccgttacgaaaagattcgaggttagggttcgggcgatcggatttaatcatcccgatttcttccccggcctgcagttcgtcatagagcataccgggctgaatcatcagctcgcggtcatcgctgcttgaatcagaatcgaagctctgtccgtcgccttttttgatatacatgccgagtgccgcagcaattctggcagcagtaagctccgagtcctcgtattctttcagcgcgctcagacgcatcagaacaccagacaaaagagacgttccgcgggtctggtgcaggcgtcgggtgaatttgagatgcagcatgttctctgcatctatctctttggtatcaaactgacgcccggatactggcaggcttttatagacctgatattttttcgggcgtccccagttatcgacaaaaacgccctgattgagctgggtggcagcatcgctgttcatcggcacaaagtccggctccagcgcttccagccagaacggcacgccagcaaccggctgaagaccatttccggtaccgcgaaccagctgagcaaatacctcaccgtcccggagccacgttcgcagcatcagccgctccagcattgggcgggtaaactgggttgtgacatctggccttacggaccattcgccccactttcggcggatatcagtggccagctttttagcgatcttcccgttactcagcatcggatgcggttcaactatgatgcccttcgcacccaccaccctttcttccagcttgtcgaaaacgccgatcaccagatcgtggttgttatccagccagcgcgcctgctgcctcagcgaaaccgcccccatctggctgagctgatcggctgaacgattttccttctgggctttgtgggtacgcgtttgctttaccgcctcatacgctttaataactgcgcgggcacgcaggcgtgaggctttccagcctggtgaaaacaggccaatcgcatcatctaaaaaactcatccaaacctcgccagcctgtagccgggtcgcccacggcgtttgttattgagcgttgccagtcgtcgctcccattcctgacggccttttctgatttccgacaggttttcgagcgtcatctgctgcccgttgaaagtgattgatttcccctccagaacagacagctcggctgcagcatagcggtcgatcatgttttgaatatctgctggattcacacccaacctcctgacgaagaccacggattagcctgctcggttacgggcttctcacgttttggttttggtttagatttcggcgcaggcggcggggatggcatttcgccagcttccgtctgcgtgtcctcgatccacgtttcccgccgtgcccactcaggagctgacggccatttgattttttcgtaaccactaaggatggcgagcgcgtcggcataaacgagcaggtcaaatgcttcgtttgcgccccggccgggcttactccatttcccttcattcgagcgttcctcatacgtcagttcgtcatagaaccagctgcccagccaggcggggaaatgcacatagccagggccgggtgaatcacgccacagcgcattattcacccggtctttaagggcatcggtctggagaagataaagaggcacatcaccagtcgcctgtgcgcggcgcgttgatctgcccgtgttgtcgggaaacgttcgctggataagtttgctgcgcctgacgctgtcccctttgaagagatagatacgcttacccagcccctcacggcgacatctgcgccagaacttgtaggcattatccgtcacgccatcttcgccccctgagtccacggccatcgacatcagccgcatgccctttgatgggtcagctgcgagcggccacgttttatcaaagacgtcagtgagtaaaagatcccagtcctccggatagctcgccggatccacctgaatgctttcaccgttgccgtcgcagcgcagcgaatgccggatgttgtaacggtcaactatccagcgctcacccatacttccataacccgtaatctgcacaacaaagcgccggttgcgcccggcctgcacgtccacggtcgcagtgagaaactgcacgccgttcggtaccgaacgttttgggacgtcttcggcacgctgctcgagcaattcacttttacgctgctccatgctggctcgcggcaaatagggcctgccgaaatcggtgttgatcaccgtcttcagggtttcttcgctgcgcgtggattcatattcctgctcggcggtcagaaacttataaataagctgcgcccaggtctggtaagcagctgccggaccttccatccagaaggaggcaatacgggaacgacggccatcaccgctaaccaggcctttcctgtcgatggtttgcccgtcccggagccagacacatttcatgttaagcgcacgcttcatgtccggtgtgatcctgcctttacaggcagggcactgaagaaacgccgcttcgctggcaagcacaggatcgctgctgtcgcggtatccggtcatattgtccatttccggctggaaatattcgccgcaatgcgggcatggccagtaaagacgacggcggtcaccacggttatagagcgataaaattccggtggtcggaggggcttcatggggcgtggagcgccgccattttgtgtctctgatatccctcccgggcgagctctcaaccagcgtcatcccggaggacatgaatgtcgtggttcgtttcgatgccagtgaaaaagcatccccctccccgtcgatatcttccggaaagcggtcataatccgtcagcgccacacttttatagtccgaggacgacatgatattgacggatggccagcccagcttcagatagttaccggcgcggaatgtacggtcgtagacgttgttatcgttacgtcttgggcttagccgggttttaacttcagggctacagcgaaaagtacggtccaggcgttttttggaatgctcgcgcgctttttcctcagatacctgaattacaagcatatctgccggatcgcagacaatgttataaacgatccagccgtcaatcagcccgatggttttacccgttcgcgctgggcccacaaacacaaccgcatcgtattcacgcgatgccagacagttcatcggctcaatcacatagggtgccagatccggatcccacggaactgagtttcccgcccccattggcacgcgcatataagtactgaccgcatcggccaccggcatacgacgcggggctcgtaaaataccggaaacatcgcggcggatgtccctggcggatgcccgctttgccatcagtcctcctcaggctgctcctcctcttttccagcgtcctgcaccttctccgccatctggtcgcgcagatcatcgataacgctttgcacacgaactaccgcagcaggcgttaaagcacagtcgcgctcgagcacatccgggagggtttcaagtaccatgacgacggctttcgccatcaatgagaattctcgcgccacttcatctgcgggtattaactgccccgtatcctgttcgaacttcagcctctcgttctctgctttccagtgggacagcctgtcagaagggggcatatcgtcgatgttggccgaaacggtagggatcatcagttcggtcagaatgtcggtcaccagatagagctttaacttgctattgctgcctggagcaggttcaacatttttcagtctcgcggcaaccgtctgacggtgtacgccggttatccctgccagctggttgatattgagttttaaagtggcaatttcctggtccatgatggtgaacactttttgaacgattcgacatgttgcgaaaatggcctctaattaaatcaaagacctgcgcacatgatgatgatgaccctggatccgaaaaactagccgtttcccgcgagcacgccgccccgtggcagggtccccctccgggagtaccttttgataataattatcaattgcacactatcgacggcactgctgccagataacaccaccggggaaacattccatcatgatggccgtgcggacataggaagccagttcatccatcgctttcttgtctgctgccatttgctttgtgacatccagcgccgcacattcagcagcgtttttcagcgcgttttcgatcaacgtttcaatgttggtatcaacaccaggtttaactttgaacttatcggcactgacggttaccttgttctgcgctggctcatcacgctggataccaaggctgatgttgtagatattggtcaccggctgaggtgtttcgattgccgctgcgtggatagcaccatttgcgatagcggcgtccttgatgaatgacactccattgcgaataagttcgaaggagacggtgtcacgaatgcgctggtccagctcgtcgattgccttttgtgcagcagaggtatcaatctcaacgccaagcgtcatcgaagcgcaatattgctgctcaccaaaacgcgtattgaccaggtgttcaacggcaaatttctgcccttctgatgtcagaaaggtaaagtgattttctttctggtattcagttgctgtgtgtctggtttcagcaaaaccaagctcgcgcaattcggctgtgccagatttagaaggcagatcaccagacagcaacgcgccacggaaaaacagcgcataaagcacttcattagcagcgccagatagcgtaatgattttgttactcatggaatatttccttttaggcgtgagcctgtcgcacggcaatgccgcccgagaggtaaacgcaacctaacggcatcacccaggctcactactgaaagactctctttgatgtgcgcgtgcgatgcgcgtagaagactgatttatcaacctgtctttatatcaggattcattacctgactatttgtgggtaaagttcgtagtgcgctgatcgtgcaaaatgattttagttgggaacagttcgcaactctgtcccataaaaatcagcatattcccatctatcccatatccagcgcattgaccatcgggatactgaagggagattccatcatctcttagaaagatcaccatctcttttgtttcaatttgcatatagctacctggaggatttatgaatgcaaggattttcatggactattaccatgagattgattttccatctttattcgcgagagcagtggaaagcgatgacgatgtgggtactacattgcgcattcacctactttgtgagcgcatggtcgaagcatggatatgcgcatgctgtgactgccaagatctctttggaagagataaaaacaaacttttaatcgaatgtaatactaaaatatccatggcgggaaacctgggaatccccccggaacttatgaaatcacttaaaaccatcaactcaatgcgtaatgaccttgcacacaatccatcaatacaaagcattgctgattcaaggatccagagcctgaaggatactctgactgaatactttaaacagcatccaacggaacccagcatggaagaatcaaaactgggtatttttaacgccgagaatcaattaaccgaagaagtttccttagatagtgacagttcaaaaaacagacttaagttaatcttgctgttcagcaagttaatgcaggcgttaatgcaattagttgcagctaatcataatgggcgctgggataaccaatttagccaattcgtttaccatgtgaccatgaacgcaacaaagagataaatccaagcccgttttgtacgggctgttgcattatcacaggcactcagtgaatgcctgctgtaatgccgctagtcgtcgagttgcaacacaccgtgatccagtgattctgaataggcgataagtccggtataaccggggataatctcaccattatcagcttcaaattcaggaattgtgccggtggtgatggtgtattgaggctggccatcttccttcgcgaaggctgccaggtcttcaatctgcttagctgtaagaactactgtcatgctcattcctcagttgtaaaaaagccccgcgagtgcgaggcgatttgattgaattctcggctcttatctcagcgcagccccttactgcgtgccggttgctcggtgatgagcatcagcgatgagacattaaagccgaccgaaggccagcggcgttcctcatgttgccgacagagccatatcgacaagaggacgaaaactagcagcatgaatcgcctattggttattcgacagtcgcactgattcgtaaatccgctcacacgtcattcctgcccggtagctttcgtcagatcgtccagcataatatcgagctgcttctgcaaggcttccgagcatgtcggcaagcattgctgcgttggctccggctgttttgcttctgacggaagtggcgagatctgcggtgtgctttgcggcgtccatgtgggtagcgagttttgttgcttcggcgcgcagctgcttaacagtggtagccaggccagcagaagtaacggcagcgctcgctgcttgagcttgagcatctttaacggcctcatcccgggcgattgttcgcccttgttcaatcatacgagctgcggtctgtgcattcgcttcctgtgaagattccgcgctatcccggtcagcccactttattttccagctgcggttcgtccactcactgccagcgagaaacgaacctaccaacgcaacaatcacaatgatgcagatgccacccggcttcactggtctatcccccagcacgtcagtgcgctttcctggtcccgccgttctacctgcccataacatccatccttctggcccttggtcaggcggcaatcgcggccaccgtctttaatccaccagcggatagcttcacaggctcctttcgtatcgccagcattaattcgcttatagaacgtagacgggaaacattttccggggccgatgttatatgggcagaaagaagcgatacccgctttctgtggttcggtcagtggtactttgatatttcggtcaacccacgccagcgccttgtcgcgttcaatggcgtttacctgggcgcatttctcagctgacagcttcatgccctgtactactggcttgccatcaaccattgttgcaccacggcaaatggtccagagtccgccgccgtcgcgatatgctgtcaagctgttaccctctttctcatccagaaactgatcgagaatcacgggtgcggaagccccggcaagaatcaaaccaacgaccgctgcgctcaatttattcttcagctttagagacatagccattgcgccgatcctcccgttctttccagcggaaataccagttcactgcacaggtgattaccgtgcatgcgataccgacaataattgcccagtcgctcaggcttaaccctgcaattctgtcggccaacatccaggacacctcttttgctgttttagctgtttcggcatatgccttcgctgatacaccgcagccggcaagcgtggttcctgatccatatgaaagtctgctgtaaatggtgctcattctggtcatagcctcacctccgatagttcggatggcgctgtgtgtgattgaaggggatcaggcaaccgggctcttatgttcaagtaaaaattaaggatgattcccggtgcctgaagatggtgatcaccacagcaacgggggagcgtggtgatcgttatgattttttcagtttttccacctcttcggtggtctgtataaacctgtctgcctccagttctacgccgatcgcccgacggccaagttctattgcagctttcacagttgaaccagagcccataaagaaatcggcaacgatatcccccggtctgctgctggcgctaatgatctgtttcagcatgtcggcaggtttttcgcatggatgtttgcctggataaaactgaacaggcttatgtgtccatacgtcggtataaggaacaagagcggaaacagagaagcagcgccgaaggattttgtattcctccagcaattctgaatacttgcggtttaatgactggtaggtagccaccagctggtggtgaggatgttcaagcttttgctgaatatgtttatcgatggcgatccgcgtgaacagttcctgcaattttcgatagtccacttcattcggtagttgccattggcttgcaccaaaccagtgtgacgccatgtttttctttccggttgcctcagctatttctttcgagctgacacccagtgattcacgggcattacggaagtaatcaatcagcggcgtcataatgtgctgctttagctctgtgcttttcctttcgtaaacatcctctttacctgtatacggtccaagatagtgctcagcaaacaaaatccgttccgtagatggaaagtacgcacgcaggctttctttattacatccattccagcggcccgatggttttgcccaaatgatgtgattcaaaacgttgaatcgggcgcgcatcataatctctatatctgaggccagtcggtgaccgcaaaacaggtagatgctgccagcaggtttaagaacgcgagcatactcagccaggcagctatcaagccagcgtaagtagtcctcgtcccccttccattggttgtcccagccgttgggcttcactttgaagtacggaggatccgtaactataagatcaatagagttatccgggagggtggcgacgtaatgcagactatcagcgttgattaactcaacactgtttatttttacagtatttttcatagatcagtaagcgtaactctgataggctcacgttgcttttgcgctaaagcagtgggccttggttagcttgtgacctgaaagcatgagctgatggctggccgggtgcgctaacacccaccagccgcccatttccacagcagaaaacccccattactggaggcgtttataacatccgaactggtaatcagataaccccgccatcaccagctgcgtaagtatgagctggcaacgttcgtggctgaggtgggtattctgtgcaatctccccagccgttgctggtttatcgcttaattcattgaaaacagcctttgccgtttctgtcatatcttcctgatttagcatgtcttttacctaaaattagttgcgtgacatacagataactctggttggtgataccagcaagagaagaatttgattctgcaaccaacaaggcctttaggcatcaggcaggaatgagatgcaataaaaaaaccacccgaaggtggtcttatatgaatctttaacgcggacttagcaaatattccacatcatcgtactaccgttatggttttcgataatttttgcggctgggctagtaccaaaagagtgcatatagcaatgatgaatagtaaggaccagatcctgcaacgtttggtcactctctagctccatgatatttaaaccaatattttgagctttgtccaaatgaatatgtctggcatgtgcatacgttgcttggtggttgtttaactcatcacatatacgcttagccttagcttcagcgtcagcctgacctgcgaacataccagtacaaagccatttctggacaatttcgttcgcccagagaattgctttttcacactcgccaatcaacgttggatttagtttttggaacgtaaattgccaccattgcagtgcagcagggttggcaaaaatttccgcttttgctctctcatactcctcaataattgcatgagatgataacccattaaactgtggatcaattggccccaagttcgactgtttacctaaaacgatctgctcagcacaacaagcaagcattgtgccacaactcattgaaatcataggtacaatcgctcggatattggttccgaactttgaacgaagataatgaccaattgattctagagctgcgatatcgcctccaggagtatggagtaagatatccaatcccagactcgtatctaacccattgatagcagacataagaccatttttatcatcatctgacatctggatcagatgttgaaacccaggcccccctttttgaaggaagcctgagtaataagaaattacatttcggccagtatgtttcgataaatcacgtaagtacttgtggcgaacctcatccgctggtgtacgttgagcgatagtacccatctcacccaatacgtctatccaatttggcatgttatcaatttatcagtatgagtacagttggtgagattgctgaccgttctgctcagtagtatttggtgttactgtgctgtatgaatagagcacaccacttctcacattcagatcgttttgctgagcgagaacacgcatagcaaaatgctgtacggattcgcctttttgaaactcttggggttgtatgcccattttttcgtaaaattcagcagcgctcatgatatgtccctcgtttttttctacatctatgcaattccaggagccatcaacacaagatgtagtagttagcagtcgtcaaatacacgaaaagcctcaagatgaggcttaaaaagattctttttgataaagatttagccaaactatagcggtcaaaatgcagatttgacaagtataaaaagcacttaaagcctataaataggcagtttttgagaattaaagcatctttaatgaggttgaacaaaatgcagtcttgacgctgaacaggactttactggaacgtagagctaaatggttcgatttcatgaaccagttacaaaaaaacccgctcatcggcgggtttataaaactttggcaacatatcaaatatgcttcaaatatggcttattttgttgcattttgcaagcgtgtttgaaggagatggtgaaatttacttcacatttctgccactttgagggcttcttcttcctcatagtattcaagagccatggccaacgcagattcatcaagctgggtaaaagcggcctttaacccagcccagtgccctgaatagacacgcaaccatgtcgaacggtcaacgctaaccatgcgggccaacgctgcaccagcatagtctttataggtttcattatttctggttgcggcaatttcctgccctgccagccataccaggcctatcagtttctttactacgcgctcctgaagggagttatcacccaggcatttctgataagttttccagacgtattcacacatcatcacctggtgcttatagctaaggtcaaaaccgtagcagtaccgcaaccaggcctgctggtatccactaagcgcggacactgccctacgccacggcgcggactcaaattccgcatcttttatcggcggcattggcctgcggcggctgcgtgtttccagcacatacagtggcgcggaaagtgagttaacaaagcgtggccccttctctccttcgagttcgacgagatgaattccacggcgaggggtggcatttttgtctgctggtgggtgttcactgaaagcctcaagctgcccttttgttcccccagacaggtcaggtagcgcgcggcgcaattctattcttacaaaattcaggtcttgttgattcatgcttctttgcgctccatacacttaagctttcgcaattacgccgatcgccagcgcccgatccataaaacgcagtagcagctcaagctgcgtaccatgcttctgctcgaatgccggtacatcggcgtgtaactcgtcgtggcactctctgcacagagggatcacgaagagatcatgggcttttgttgctgtcccccccataccgtgccctacgatatggtgcggatcatctgctggccgtcggcaacactcacagggttgtgttttaacccagcgggtgtacgtctcatttatccagcggcgtcgctttggcctgagcatgaaagattctggagactccggatcaacagagagcgtgaggatcttcttcgccttctcctgcacgaggctggttgcagaagcggaaggcacaatgtcgctttccctcatgaccgagcggatcttatcatccggaaggcgtagccccttgtgcgcaacgctttccggaataacatcagccaggtcgtttctgaccatccaccagcacagttccggaagcgtcaggatatgcgactcgggaaaaccagaatcacgccgaatgacttccagaatccaggataccaggtttcctgccgctatacctgcaagctgttcggtatgctgccccgacaaagtgtgatcgcaatgccagcacaggcgaatacttcctggtgggtgccgcattgttgtgaagttcttgtcgtgccacgatgaatgtggccactggcattcaaaccgattactcaaccattgctcaagggaaggaagcccaccagcacgctgaataacccgatcattctcgaagacctgccgcattaccggatcatcagccagcggctgaatggcggcgggaacagctcctgtactgaatgacgccatttcttctggttcaggctcaagcagaacgcgaccgcgcataaagaggtgcatcagttccgcgccgggacgaaacaacacaatccccatacgatgggcgatctcgggggtaagcagagctctcacgcgacctgccccctggcaatgtgttctgcccacagtccaccaatccagcgcacgcctttcgccgtgaaacgtgcctggctgaatgcatgatttgaggttacggatgtgccggttttcacttcaaaacggcccgcatcaatatgctgatgccgtggggtcatcgttccgccaagacgatacatgatgtcgttctcaaggaggaataaccgcagatcgggctctttggccttaagcagttttgccacctggcggaatgacattgacccactggctgtacagtaccgatcaacaaacgctaccttcggcgccgcggcagccagttcgttagtcaactgctgtttttgttctgcaaggtcagctgcaagacgtagggcttcagagaatgattgaggaatcgtctgctgctgtgcctgctcaagctcctgccagcgatcaaccagacgcgcggtaaactccggcgacagctgcgcgacaacgatataactgtcccgcttccctatcagataaaccgataccgactgattgaggtgatttttaacttcccccattggggggagttcaataacaccgcgctctgccaggcgttcaatggaccgtttaacatggtcatgtcttgattccaccagctcagcaatatcgctgctggacatggttaacgctgttgttgctaactggctcatacttttctccatatcaggcggctgcacccgccggttcatatctgctgattgttatctctacccgacctttcggcacaacgggtccccattccaccagcatgcgcttaatctggctgtcgtcttcccagacacccgcatgcgtcagcgcgtcaaacagggctttgttgtaattatcgatatcccggcggcgcgcatccggcgggtacagagtgatttctaccgctgccagttcagtcgatggcttcgggagacgtcgtaattgctcaatgatcgccacgcaggcagcgctctggtatttacggccagcggcgctaatgaggtgacgaccggccagcggccccttgttaggggcgcgccagtaagtgttcacgctcggaggaaaaggcaggatcagtttcacgcggcctctccccgcatattgcgaacaagttcagaagcagcagtaatgatttcgctggtggcagtccgctccagccagagttgattgatattggctttcagcttgtgttgcagtgactcatccagcatgtcagcaccatccacctggtcgaatacaattctaacctccagcggccagatacgggactcgggaagcggatccgatactggtttagctttctcacgaatgtgcatgcggatctggcgaatattggaccaactggaaacatccaggcttcccatggctgcaatgaagtcagtgctgttcatgccatattcaccggatgcttcaagggcaacagtgcgaatacgttccgacatatccaggcgcacagcagcgtcatcgaattcaatcgacaacagccactcatccacaccgaacaaaatactctcacgaataagcagcttcgctttgtcgatcgttaaaggtgatacctgagtgaattccggtgcttcgacagaatccgccgcccaggtatgcccaaacttcgattcactgaatgtgtattcttctttatcgccaaacgcagctctaacgcatgcccacgcctcgacaccgctgatagcaaaaatatctttctgggtgagtggcaactctgcttctggcttatcagctgcaggaggtgtggcagttacaggttgagacttgctggcagcaaattgtgccaaagccataaacgcccgcccttttgcctccagttctgtgcggttgatatagctgaaccgctcgccacgccatgacttatcgaatacagctatggcaccggcaaaaaacgcgctggtgggtttctgtttttcgtcagcaggtacaaaccacacaggcagatcgaacccaatgcgcccgcgaatgaatacaatgtgatcggcatcttccggccaccacgtttcactcggcgcggcttttatcaggaatacatagcgaccgcccttctcgcgctgggctgctgcgtagttcatgatgtgcgtcatgccggtgatcgcctgcttctcgtggtactgcgaacggctatacggtgggttgccatagccagcgccacccagttcagccagacgttcagaccagtcctgcgtcagcgcgttatcttcggcggtgtaccatgccgggcatttcgcgttgtcgtcgtcagcaaacaaatccagaactaatggaccaaatagcgcgttgatcccccaaaaaagcagatccggtgtccgccactgatcgccaacctctttcaattcgtgagctggtttgctacgcagtgccgccagcgcctggcaatatttattggtcatcatgaacggaaccccgaattttctggcagtgagtaatcaacactctggaagtttgcgcggctggctgagttagtctcccatttgccgttaacgcgttcaggccggccagcactggaccatttggtcgcgctttgcaggtaaccagggaagttttttggaatgaacagagttgccgggcggaggtattgcgcctgctcgctatcacgccaatcggcatttttgtaatccactaccaagcacaggtcatcaacagtgaattgttcccgaagacgggcgcgaatattctccagcgacgtgctgcatacctggtagcgtgagccagtagtctgattcaggtaagacaaaacctgtctggcctgatcagtaatcacaacctcagggtcgggttgcgccgcaaccggacaagagggttttgaagttacttgtggttcttgttttgattttactgacggatccccaccagattctgacgggtcaaaaccgccttttttgctggatttcgacgcctcaaattttgacgggtcggattttgatgcatcagattttgatgggtcagattttgatgcgtcagattctgacaggtgagaaaaagcagcctctcgcaacttaacgacgttaagctgatatacgttcgatgcgttacggttcccattacggcgctgcttacgggaaagccagccatccttctcaagctgagcaagggccgtccttaccgtactttctccagcaccgatttgacgtgcgatcgtgccaatagacggccagctaacaccctcatcactactgaagtcggccagacgcgccatgatggcaacgctggataacttcatgcctgacgaagcgcatgcatcccatacgtaaccggttaatttagtgctcatggtcgtcctttaattctgtaaatttacgctggaattgttcaagagggctgaagcactcatgatcgtacccttcgcgaaggtatataacgcgctgtgtatctggctcccagcggacaactctgacgggaactccgtagtgatctctgaaccgccggttaacttcagccattcctcgcgccccttctcgttcatctgaacaaatgcttctaccatcaagtctgctggctggtagttgcctccatcagccgcgttatttatgatttccacatagccgaactgggcatctttacccaccagcggcaaacatctgaattgcttagctggtctgaatcggtttacactgttcatgcgttagtttctccactgatacgacacgccaaggcgcccggagctgcacactcgcgggcgtcaccttttctgcctgttgaaacgaatacgtcaatcgcctgatctgaaacaccaaccccataaagcgccataaatcccaggaacccgtgaatctggtggcggagcttcttactgaataattctgaaagcattttgcgctctgatgaatcaattaccccatcagccgctgctgccatcttggcattagccagctcaccagatgctgctgccgctttcatctcaatgctgtacagctcaacgttatccaggctctcagcagttggaacatccaccagccatttcccttttcggttcgcctggtactcggccaagtaacaagaaccagacaggtcctccatccgttccagttctgccaaggtaaagaaccgactgccacacttctggtacaggtggttgtggaactggtcgatagtcatccctaaatcggaagccatacctaagcgaccatgcttgtgtgccttacacatcaggcggattgctgtatttatgctgtctaccatgttgatttccctctggtagttaataatcaacttaaagttgactattgttgttagcggaaggtatgccgtcatttttgttcggataaatatcaggtcgtaattgatggggagttactacccatccgccccattggcagagttgaataactctttcagaaggtactcggttctttgcaatccagttcgcaacagattgaactgattggaattcaaaccgccttgatacctctgaaatcgacccgatcgccttcacagctttagctgttacattcttgtgttgagatgacatgtgttctcctatgactaagcctgcatcaatactacttatagtagcaattattagcaacttaaaatagaaatgacaactatgccttgtgcgcttaatcttctacttatggtggaaaatgctaaatacaaagactttgccgaaaggctaaacaggtctctccaagagcaatctattggagttaaagaattgtcagagttcagtggtgtctcgtatgagatggcgcggcgctacactcttggtactgcaaagccgagagatgagaagatgattcgaattgcagaaagacttgccgtctcaccggcttatcttgattatggtgtgcctgttaatggtggcgacgcgccagccaaaggcacggtcagaatagagcaattggatgttcatgcttcagccggttccggatatataaaccaaccattccctacaatagtgagctcaatagagattccagaagagaggatcttcgagttgtttggtcgtagaagccttgatggcatcgtcatgataaatgttgatggcgatagcatgatgcccacgctttgcccaaaggacctgcttttcatagacagcaaggttgaacaattcagcggcgacggcgtttatgtgttcaattttgaagacagtacgttcgttaaacgtttgcagaaggtaaaagggcgccgactggcagttctttcagacaatgaacattacccgcccttcttcatagaggagcatgaaatgaatgaactatacatattcggcaagctaatcagatgcttacctctaaaaatgatagagtttggctaataattaattcatcaagaaaccggcgaaagccggttttttttacgcctccaattcctcacctcataacactacactactaaaaatttcattttctactttttgttgttgcaattatctacttaaagtagctatagtcattgcatcgaaagcgaacaggcaggacgcccacgaagtagccgccggtggcatatgaataaccggatgattcgctgacagaaaacttaggttgggggtagaggtttacatgaatcatttattcacatgctcattttgcggagcaaccgaactgggagcgataaagatcgtcgcaaaaggtggtaaggacgaacctgccatctgttcggaatgcgtagtcacatgtgtagaaaaaatgatcctgactaaaaaatcagaggctgaaaaaccaacctctgataacgaaataatatcagtcgataaaaaactatttaaagagcttcttcagcttgtcctcaaccttcctgatttcggaagtaagctggctgctgttgacattgatagtagctccacatcgacaagtgaaacttttgttcgacttgagccaagcgattttcttcttcgtcttagtgccgcacttagggcatgcgggtaacgtaatttcctggttatcaaaagcgcccataaacatccctcttggttgtgtgagaacaccaagataccaccgcgcctgatgtggttaaaagcaggctaaagcaataacaagtaactccctgttctggcggcccggtgttttcccgtgtatttccggtaaccgccagcctttttcagggcacaacagaaaagggcatcaccgggcgacgggctcataacccaatccacccgggcaaaaagaaagcggtctctgcaagccgccgaccaatgcaggtgcccttctctgttgtgtatggagaaactaactttttagcgtctgtgcagatgcgctgaggaaccgagaatgaataatccgtttttcaaaaatatgttggtgtatcgcattagtcgcgatttcaccatcaaccaggaagagctggaacagcagcttgaactatttcgcttcactccatgcggtagccaggatatggcaaaaaccggttgggtatcaccacttggtcagctgtcagatcgcttgcatcacactgtcaataatcaagtgttgttggttattcgccgggaagaaaaaatactgccatctcctgtcattactgaagaactgcgcaagcgtgtgtcgcgtctagaatccgatcaggggcgtcgcctcaaaaaaactgagaaagattcgctgcgtgatgaagtgttgcactccctgcttcctcgggcgttctccaaaaactcgactgttggtttgtggatcaacgtcaccgacggtctgatcatggttgatgcagccagcgctaaacgtgccgaagactcactggccctgcttcgtaaaactctcggttctctcccggtggtaccgctgactatggaaacgccgatcgaactaactatgaccgactgggttcgttccggtagtgcgcctgctggctttggcctgggtgatgaagccgaactgaaagctattcttgaagatggcggtattggacgctttaaaaaacagactctggtcagtgacgaaattcatgtgcatctggaagctggcaaagtagttacaaagctgtctatcgactggcaacagcgcattcagttcgttctttgcgatgacggcagcatcaaacgccttaagttctctaatgagattacagaacaaaacgacgatatcgaccgtgaggatgcggctcagcggttcgacgctgactttgttctgatgaccggcgagcttatctctctcattaacggattaacaacctctctcggcggcgaagccaagcgataaacaccaggcaacaattacccccataagcatgggttgggttgctgcacgctaaattcagcaattcattaatttaatggcgcggtgcagcgcgccaatatggagaaaaccatgagctacattcagacattatccggcaaacattttaattacctcgatatccaacaggacgatatcgtgatcgaggatattgctaccgcgttgtctcatatctgccgctttgcagggcatcttcctgagttttacagtgtcggccagcatagcgttttaaccagccacctcgttccgcaggagtttgcattagaagcactgcttcatgatgctgctgaagcctacctgcaggacatcccctccccacttaagcgcctgcttccggattaccaggcaatcgaagctcgtgtggacgcagccattcggcagaagttcggtctaccaactgagcaacacccaaccgtgaaatatgccgacctggtgatgctcgccagcgaacgccgcgattttgagattgacgaaggttccatttggccatgcctcgagggagttgtcccaacggatttattcattatcaacccagttcgtcctggccagtcatacggcatgttcatcaatcgctttaacgagttgatggagcagcgccaatgcgccgcatgaaggtaaaagaactcgtagcggaggcgtttgcctccgttgctgaattgccaccaaagcatgcgccgcttatgcgcgaagtcgccaccagactggacgctacgttcgcagcattaaaagagtctctggtgcaactggaacaggaacgtaaagataaaacgccatgaccgtatttgaatatctccaggctcatccgaataccaccagcggtgaaatcgccaaaggtatgaacaaaaagaccccagcggtcgccggagcattatctcagctctatggcaccggtcggatcgtgaagtctggtgttcgcaagggtattccaacataccgcattaacgatatgccgtttggttgcagtaacagcctaaccatgatgtttaaccagctcttgagcagagccagacaaggagcagcccaatgacagcactcaacaaacaggcgctgcgtgaagaattccagttcatgcaggacaactatagcgacccggcagaccacgatcggcaggtgatttacatcgaggcggaggcgctgctggatgagttggaagccaaagactcaacgatagcagcacaacaacatgagatccgtatgttgctgaatgcgcttgaggaaaaaccatgcccgaaatgcaacgacacaggaatgactgatagtggcggcacgcagccatggggcgagccgattgagattgaatgcgactgccgacagcaggatgccaacaccgcagaacttgtagccgctggcattggcgtgaagggggagtgagatggataaattaatcaaacctaccgccaaaggtaaatatgacggttcatgtgattatctttgctcggaagatgcgcgattcatcgttatgcgcggcgattatacggaagcggaaataattcaggcttctgtgtctcaagatgtaatcgactcggatggtgcggctgattttgcaagtagcgcccgctattatcagtgctggtacaaagttagcccaataggtggtcaggatggctattcaggctggcatcatcctcgtgattcgccgtgtcgcggtgcatatttcgcatcagttttgcaatgggattaaggaggactaacccatgacaactaacaaccacccggcgcacggtcctgtatcactcgatcgcctgcaccagatacgcgaacacctgctgcatgatacccaatactcaaacggcgggaacagagcctacattctcgctgatgtattgaaggtgattgatggggctattgcccgcgagctggtacgccgtgagcatgcagcgtggtcacaggctactttcggcgatgtcggtccagttggtccgctgaagcacctttccaaagaagcgctcgaggctgctgctgaaccaggcgaccttagcgaatgggctgacatgcaattcctgttatgggatgcgcaacgtcgtgccggtatcagtgatgagcagattacccaggcaatgataaaaaagctggctataaataaggttcgccaatggcctgagccgaaagacggggaacctcgattgcatatcaaagaacagtcagagcaggagaaaaaataagaatgtttagcctgattcggcgcggtcaaatctacacggacagtagcaactggcccgtaattatccatagctgtagtgatcactcggtccgaattaaacgcaatgatggcgagctgagaacgattagcatcaaacgctttaacgaagattttgaacgagtggagcatgatgagtatcgcaaaatatgtgccgaaatagagcaggaaacaaacctgaaaaacctacgtgcgatgcgtcgcggcaagattactgaatagccaaacaggagaatatttaacgtgaacaacttaatgatcgaccttgagtccatgggcaaaaaaccgaatgcccctattgtctccattggtgccgtattcttcgatccgcaaagcggtgaactgggtcaggagttttacaccgctgttaatcttgaaagcgctatggagcagggagcggtgccggatggtgacactattctgtggtggttaagacaaagctcagaagcacgatcagcaatctgtgttgatgatgcgatgccgatatcatctgccctatctgaactgagccatttcattaatcggcattctgataaccctaaatatttaaaagtttggggcaatggagctactttcgacaacgttatattgcgcggcgcatatgagcgtgccggccaggtttgcccgtggcaattttggaatgatcacgacgtcagaaccatcgtcacattaggcagatctgtaggtttcgatcctaagcgtgatatgccatttgatggggttgcacataacgcactggctgatgcccgccaccaggcgaaatatgtttcagcgatttggcagaaactaatcccaaccaccagcaacagctaaagttttccccgggtgcagccgggataatggagaaataactatgagcaatattttccagttagctcccaacgattgggtttgtgaaagcgttttgatcgcggttactgggctcaaacccggaaccatcctccgtgccagaaaagaatgctggatgattgggagggagtatatccacgtatcgcctgacggaaatcctaaaccttccagtgagtgcatgtataacagaaaggctgtagatgcctgggtcgcttcaatgaaaagcaagcaaccagggtgatttgatgccatgaaaaaggtaagctcgtatcgctcttgggcgtctggaggtaacaccaatggataaagtcacatatccaacaggcgtcgaaaaccacggtggcacattacgcatctggtttaattttaaaggtaagcgtgtcagggaaagtctcggtgtccctgacaccgctaagaacaggaagatagccggggaactgcggacatcagtatgttttgccatccgcacaggaacctttgattatgcaacccagtttcctgactcccctaacctcaaggcttttggtgtaagtaaaaaagacattacagtgaaagaacttgaagaaaaatggctggatctgaaacggatggaaatctgcgcgaacgcatttaatcgctatgaatctgtcgcaaggaatatggtgccgaggatcggaggtaatcgcctggtgtcagcagtaaccaaagaggaattgctgtatctgaggaaatatttgctaactggttatcagaatccgacgaaaaacaaagccccggcaaaagggcgaagcgttgttactgtgaactattacatgacgacaatggccggaatgtttcagtttgctgcggatcacggttacttagaggtgaacccattcgagggaattaagcctctgaaaaaagccagggcagaaccagatcctctgtctcgtgatgaatttattcgcctgatagatgcatgccggcatcagcagacgaaaaacctgtggtcattagcagtgtacacaggaatgcgtcacggggaactggtctccctggcctgggaagatatcgacctgaaggctggaacaattaccgtcagacgtaattatacgaaacttggtgagttcactctaccgaaaaccgaggcaagcacagatcgagtggtgcatcttatccagcccgcaatcagtatcctgaaaaatcaggctgaaatgacaaggctgggcaggcaatatcacattgaagtgcagttacgtgagtacggccgttcggtgaaccatgagtgtacattcgtctttaatccgcatgtggtcagacgcagtaagcaggtcggatttatctaccgggtcgattcagtaggcgactcatgggaagcggcacttaagcgtgcggggatcagacacagaaaggcgtaccagtcacgacacacctatgcgtgctggtcattatcagctggtgcaaaccctagttttattgccagtcagatggggcatgcgagcgcgcagatggtgttcaatgtttacggtgcatggatggctgacagcagcgcagagcagatcgcaatgctgaatcagaagctggcagattttgccccattgatgccccatagccacgagaacagtacgggaggattattaaaatcagtaagttaacccctaacgcccgtcatgttaactgtgtggagggtaacaccacgctttatgccctgccgaaacccgaggttgtcctgcgctggcgtgagcagaccacagatgacttccgcttctgttttaagtttccggcgaccatttcgcatcaggcagcattacggcattgcgatgatttagtgactgaatttttgacccgcatgtcaccgttggctccgcgcattggacaatactggctgcaactgcctgccacattcggcccacgggagctgcctgcgctttggcattttctcgattctcttcccggtgaatttaattatggggtggaagtccgccatccacagtttttcgccaaaggggaagaggaacaaacgcttaatcgcggtttacatcagcgcggcgttaatcgggtgattttagacagccgcccggttcatgcagcacgtccatacagtgaagctattcgcgacgctcaacgaaaaaaacctaaagttccggtacatgctgtactgacggcgaaaaatccactgatccgttttatcggtagtgatgatatgacgcaaaaccgggaattatttcaggtctggttacaaaaattagcgcagtggcatcagaccactacgccttatctttttttacatacgccagatattgcccaggccccggaactggtacataccctgtgggaagacttacgtaaaacgcttccagagatcggagcagttccggctattccacagcaatcttctcttttctgaatttgccacctatcatagacaggtgccatcggccattttaaagggagtttgtatggtaagcgcgctgtatgccgttttaagtgcgttgttattaatgaagttctcttttgatgtcgttcgcctgcgaatgcagtaccgcgttgcctatggcgacggcggttttagcgaactgcaaagcgctattcgcattcatggtaacgcggtggaatatattcctatcgcgattgtgttgatgctgtttatggaaatgaatggcgcagaaacctggatggtgcatatttgcggcatcgttttgcttgctggtcgtctgatgcattattacggttttcatcaccgtctgttccgctggcgacgttctggcatgagcgccacctggtgtgcgctgttgctgatggtgctggcgaatctttggtatatgccctgggagttggttttctccctgcgttagcgcacaatacgccactttctttttcccggatttttacgttatgtctcaccgcgacacgctattttctgcccctatcgccagactgggcgactggacctttgatgaacgggtagctgaagtcttcccggatatgatccagcgttccgttcccggctattccaatattatttccatgattggtatgttagccgagcgcttcgttcaacctggtacgcaggtttacgatctgggttgttctctgggcgcggcgacgctctcggtgcgtcgcaacattcatcatgataattgcaaaattattgccatcgacaactccccggcgatgattgaacgctgccgtcgtcatattgacgcctataaagcccctacgccagtagacgttattgaaggtgatattcgcgatatcgccattgaaaacgcatcgatggtggtgctgaattttaccctgcaattcctggaaccttccgagcgccaggcgttactggataaaatttatcaagggctgaacccgggcggtgcgctggtgctttcggaaaaattcagtttcgaagatgccaaagttggtgaactgctgttcaacatgcaccacgactttaaacgtgccaacggttacagcgaactggagatcagccagaaacgcagcatgctggaaaacgtgatgctgaccgattccgtggaaacccataaagcacgcctgcataaagccggttttgagcatagcgagctgtggttccagtgctttaactttggttcactggtggcattaaaagcagaggacgctgcatgatcgactttggtaacttttattctctgattgccaaaaatcatctttcacactggctcgaaacgctgcccgcgcagattgctaactggcagcgcgagcagcagcacgggctgtttaagcagtggtccaacgcggtggaatttctgcctgaaattaaaccgtatcgtctggatttattgcatagcgtaaccgccgaaagcgaagagccactgagcgccgggcaaattaagcgcattgaaacgctgatgcgcaacctgatgccgtggcgcaaagggccgttctcactgtatggcgtcaacatcgataccgaatggcgttccgactggaaatgggatcgcgttatgccccatctttctgatttaaccgggcgcaccattcttgatgtcggctgtggcagcggttatcacatgtggcgcatgattggcgcaggggcgcatctggcggtgggtatcgatcccacgcagctattcctctgccagtttgaagcagtgcgtaaactgctgggtaacgatcagcgcgcacatttgttaccgttaggtattgaacaacttccggcactgaaagcctttgataccgtcttttcgatgggcgtgctttatcatcgtcgttcaccgctggagcatctctggcagttaaaagaccaactggtgaatgaaggcgaactggtgctggaaacgctggttattgatggcgacgaaaacacggtgctggtgccgggcgatcgttacgctcaaatgcgtaatgtctatttcattccttccgcgctggcgctgaaaaactggctgaagaagtgtggttttgttgatattcgcattgcagatgtgagcgttaccaccacagaagagcagcgacgcaccgaatggatggtcaccgagtctctggccgattttctcgacccgcatgatccgggtaaaacggtggaaggttatcctgcgcctaaacgcgcggtgctgattgcgcgcaagccgtaaaggtctggtaatactgccggatgcggcgtgaacgccttatccggcctacaaagtcttgctaattcaatatattgcaggggctatgtaggcctgataagcatagcgcatcaggcagttttgcgtttgcataacctcagcgcccgtttccgggcgcttttcacgtcttatgcctgaacagctggctgatcaaacgccgttaacttcagcgcattgcccgtatatttttcgatatacaccagcgcagagttaccggcacaggcattcgccagctgcgagctggggatatccgccgttaacacgttcgcactaccgtttttacacaagccattttccagatctggccatgcaccttcatgcacgcataccacgccttttttgatcccgtcagtcaccaccgcgcctgtcagaatctgaccgcgcttgttccagacacgcaccagatcgccattcgcaataccaaagcgagcagcatcttcggtgtgaatagtgattggttcacgatcggcaaccgcatattttttacgcagttccgcatagttaagctgactgtgtaaacggtgtgccggatgtgcggtcagaagctgcaactgcttctcgtcggcggtacccttccactcatcaggcgcaagccaggttgggtgtgccgggcaatccttatagccaaatttttccagcgttctggagtaaatctcaattttgccgcttggtgtacccagcgcatttttcaccggatcggcgcggaaatcaccataacgaatgtactgttcgttcttctcgctgcggcgcatttcgatcagtttattttgctgccagaaggcattaaacattggcatcgtcacgcgttgcgcacgcgcacctttctgagcggcatcatagaaaaatttcagccacgccatttcatctttaccttcggtatagatctcttttccgccaggtttgagtaattcagcaagatcggcaaacacgtcaaaatcgttgcgcgcttcaaattgcggagcgacagcctgcttcatcagcacaatatgctggttgctgtaatcaccggtcatcgtcaggtcattgcgctcaaacgatgtggtgatcggtaatacgatatctgcgtgtttggctgctgcggtccagtagcattcagaaacgacgatcatctccggtttctgccatgctttaatcagacgattagtatcctggtgatgggtaaagttaccgccacccgcccaccagatcattttgatattcggatacgtttgttctttaccgttatgctgatatttgccgccaggattttccagcgcatcgacgatacgggcaacaggaatcgccgtcattccgccatcatcagcggcctcgctggcctgtccggcaatcgccgcagacatttctggtagcacgccgccaacacgcgtcgggttgccaccgttggagtaatgataagagaaaccaaacccgccgcccggtgtaccaatctgccctaacatcgccgccagcgtcaccagcatccagtgtttctgttcaccatattgctggcgctgaattccccagcctgccatcagcattgtgcgatttgccgccatcagttcagcgagtttgactatctgcgcttccggtacgccagtaatttccgccgcccaggccgcgctcttcggcgtattatcgctcttacctgtcagatactcttcaaactgcggatacccggtagtgtatttttcaaggaacactttatcgtgtttgccttgtgtcatcagggtatgcgcaatccctaacatcagtgccacatcggtgcccatattcggtgcgatccaggtggcattatcgccaaagaattcgatggtttcggagcggataggatcaatggcaatcactggtttgccagattttttcagctgatggaagtattccagcccttgctcatcggtactgctccaggcaattttgagcgtgttcagcgggttcatcccccacagcaccaccacctggctgttttccagaatcagcggccaggaggtctgctgttcatacacctctacagaaccgaccacatgcggcatgatcacctgtgccgctccggttgaataatcgccgctatgcccggaataaccgcccgccaggttcatataacgttgcagtaaggtttgcgctttatgcaacacaccagaagaacgccagccataagatccggcaaaaatggccgatggtccgttagctttgcgaatgcgatcgtgttgttcatgaatcagttttaatgcttgttcccagctcacctgtacataggtatcttcgccacgacctttcaccggttgcagtggattatcgagatagctttttctcaccatcggatgctgaatacgcgccgtggtgtgtacctgatccgccgccgtagactgtaaggagttcggtatggttttcgccagcgcgcctgtcgaagaaacaatcttgccgtccttcacttctacgttcatcgctccccaacggcccgcagtgagaattttgccgcccttctcttctgcccatgcgggtagcggtgcagccgatgtcaccaccagcgtccctgccgcaataccgctatgtttaataaattcacgtcttgttaatgtcataacttcctccctgatcaacgaggatcactgtttctcggtaatatctttggcgttgtactggaagtaccgcgtcaaaatgtccagttcgttttcgctcatgctggttcgcgcacccattcctttggcaatggacggccatgtattgacggtgtaatggtcggcggcaataggggcatggcagccagcgcaataggtatcgtcaagtttttcagcgtattgccatagcggtttacggtccgctaatgcgggatcgataagcgccccctgcaaagacgcctgacgccattgattgccgtattcgtcagcctgccattccccgtttaccgttagcgccttgataccttcttcacttaatgtggcgagcgccagccgttggcctgccgccaggtagagcgtgttttcactgccctgcatttgataaccctgcaaccgaacaattggctgtttgccactggcatcaacgacggtaagatcggtaccaggagtcacggtagccagttcgcctatgcgagaagttttgaaaggataaatatgtgcgccattagtaactgaagtagcggcctgactttccagctcatgcgccgcgttgtcatccatttttatttctggcggaaaatgggcaatgcctttatggcaatcgatacaggtttcgccgtccttttgcgctttattatgcattttctgcgcagattcactttgcgaggcaatatccatggcatcaaaagaatggcaactacggcaggttgcagagtcagttgcttttaattctttccatactgtttcggccatttcctggcgatgagcttcgaacttatcatcactgtctattttgccgctaacaaattcatgataaatatctttagatgcttttaatttagcaaataaataatccatccctgactttggaatatggcaatcggcacattccgcacgtatccctttctggtttgaaaagtggacagttccctgatattcctcaaaaggtttactcatcgagtggcaggaaaggcaaaatgcggtatccgacgttttatgtaaggctttttgcgccagcaataacccgccgccaccaaccacaaccgctatcagcaaaaacaataacccaatgcgttttttccctcgcatagattcctctaattaaattccaggacaccgataccattgtataaataaatacacaacgaattgactacttgcttaattcggcacaacactgcctgaaataatcgataaagaatatgatttattacaatgtaatcattaattgctaaggaataacccagttgttatttagaatatatatttgtcagttttggcaatttaaatcacataatgaatgtgaatatataaaatatttttagcacaacgctatgcgcactgtcacccgctcaacagatcacggcaatcgttcgttttttatactgctcagggataaaaaaaggcccctgttgaaattgcaggggcctggtacgagcaagcatcatattgggcgacatgatgcaacggtaaaaatcatttggcctgatggcgttcaatgattcctttcatttcagcaaccgccgccccgtctacgacataacgcgaatactcgtccgcgtgtgcatctgatgacatggacaatccttgattacgataacgcatcggtgaggcttgccacgctcccgcggagctatggacttccagcactccggcatcgaggaagtggtgcaggttttccgcacggactcctgctccggccataatgattggagcatcacgatgggcaataagttccataatttttgataaaccttgcagtgcgtctgatttttgccctgatgtcagtacccgggcaatgcccaattccgtaagattattgagtgtatttaaagggttagcgcacatatcgaaggcgcgatgaaaagtcactgccagcggaccggcagcagccattattttttccattcgtggcatatcgacattcccgtcaacatcgagaacgcccgtcaccagtccaggaaaacctaattcgcggactgtgcgcacatcttcaagaatggcggcaaactcaccgtcgctgtagcaaaaatcaccaccgcgtgggcggataatcggatgcactgggatcgtcacccgctggcgcacggatttcagtacccccaacgacggcgttaagcccccctcttttggagctgcgcataattcaactctgtcagcgccgttttgctgcgccgttagcgcgcattccatgctgtaacagcaaatttccagtaatgccatttttgctccttagttacgccgactgctcgctggcaacgatctcttcaatggaccacggatgaaacttaatggttgttttaccatcggtgaccgccagcgtcggattcggtaatcgttcatgctcaccttttggcgaactggttttaactgagatccccggcaggctgagtccttcatcagaaagcaatgccagcgcacgggcattcagcgtttctggatcacccggcagaacgatttcaatatgttcccaaccttcgtgcgggtaacgtttttccccgggccacggtagctccacaatggaaaactgccagtgcgcaacctgtaccggttcatgcaatttaaacagacaaatcggtctgccattgatcatattttctgacaaaagctcgccgcactgttcaaacccgcgacgccagcgttcagcggtgacgttttgatggcaacgcaaggaaatgtgatcggcagtcagcggagtgatatccaaccccagacggcgggaaagttcatctaatgcgtgggtaaatcgcggtaaatccgatgcaatatcctgcagctcgtcgatagattgccagttcgccataatcactcttcgtctttcattaaaagcgttaatttaccctgttgccctgcgccaaccaaccgctgatttcacgccgcttctgatgcaatagtgaaaacggcaatacgccacgcgcacgttgctgacgaaaacagccatttgcagtatactcccgccctaatttctttaactggtgcgggcaatttttgctcgcttcatcaatgtaaggtattccggtgaatattcaggctcttctctcagaaaaagtccgtcaggccatgattgcggcaggcgcgcctgcggattgcgaaccgcaggttcgtcagtcagcaaaagttcagttcggcgactatcaggctaacggcatgatggcagttgctaaaaaactgggtatggcaccgcgacaattagcagagcaggtgctgactcatctggatcttaacggtatcgccagcaaagttgagatcgccggtccaggctttatcaacattttccttgatccggcattcctggctgaacatgttcagcaggcgctggcgtccgatcgtctcggtgttgctacgccagaaaaacaaaccattgtggttgactactctgcgccaaacgtggcgaaagagatgcatgtcggtcacctgcgctctaccattattggtgacgcagcagtgcgtactctggagttcctcggtcacaaagtgattcgcgcaaaccacgtcggcgactggggcactcagttcggtatgctgattgcatggctggaaaagcagcagcaggaaaacgccggtgaaatggagctggctgaccttgaaggtttctaccgcgatgcgaaaaagcattacgacgaggatgaagagtttgccgagcgtgcacgtaactacgtggtaaaactgcaaagcggtgacgaatatttccgcgagatgtggcgcaaactggtcgacatcaccatgacgcagaaccagatcacctacgatcgtctgaacgtgacgttgacccgcgatgacgtcatgggtgaaagtctctacaacccaatgctgccgggtatcgtggcggacctgaaagccaaaggtctggcagtagaaagtgaaggcgcgaccgttgtattccttgatgagttcaaaaacaaggaaggcgaaccgatgggcgttatcattcagaagaaagatggcggctatctctacaccaccactgatatcgcctgtgcgaaatatcgttatgaaacactgcatgccgatcgcgtgctgtattacatcgattcccgtcagcatcaacacctgatgcaggcatgggcgatcgtccgtaaagcgggctatgtaccggaatccgtaccgctggaacaccacatgttcggcatgatgctgggcaaagatggtaaaccgttcaaaacccgcgctggcggtacggtgaaactggccgatctgctggatgaagccctggagcgtgcacgtcgtctggtggcagaaaagaacccggatatgccagccgacgagctggaaaaactggctaacgcggttggtattggtgcggtgaaatatgcggatctctccaaaaaccgcaccacagactacatcttcgactgggacaacatgctggcgtttgagggtaataccgcgccatacatgcagtatgcttacacgcgtgtattgtccgtgttccgtaaagcagaaattaacgaagagcaactggctgcagctccggtaatcatccgtgaagatcgtgaagcgcaactggcagctcgcctgctgcagtttgaagaaaccctcactgtggttgcccgtgaaggcacgccgcatgtgatgtgtgcttacctgtacgatctagccggtctgttctctggcttctacgagcactgcccgatcctcagcgcagaaaacgaagaagtgcgtaacagccgtctgaaactggcacaactgacggcgaagacgctgaagctgggtctggatacgctgggtattgagacagtagagcgtatgtaatcgcgttatacggcaacagccgatgttattgcagacatcggcttttttatcattaacgataatttacaatcacttcattccgttgaatctttagcggcggaattaaccgcccaccgccaggcacttcccagataaatcgcaacggttctgctgccgctataccggaaaaggccacggtggttccactctgcccttctaattcgacacaacgagattgtgaacacaagcgaacccgcagtcctgcaggtgtcgggccgataagctgataacgccacgccaccagcgtcatcaatcctgcagcaggttgtcgagtagaaagaggcgctgacgacatcgactcaccacggtgattcagcgtaacgcccacgctactcgcctgccacatcccctccccggcggcttgcaccagcagcggaaacaataatattgctaataaggctctcattatttgccgccaatcgtcgccgtcatacggatatgtcggttatctgatagttccagattcgacagcaccactaactgcggcaagctgcggcgcaggaagcgagacaataatggtcgcagcgcgtggttcaccaacagtaccggcggcgcacccaacatctcctgacgggatagcgcttcctgagtttgcgccaacaagcgatccgccagccctggctccagtccccccccgccctgcaatgcctgtagcaacaaacgttccagcggtgtatcgaggccaataacatggacttcatctttgccaggaaaccactgctgggtaatcgcccgtcccaacgctacgcgcacgacggcggttaattcatgcggatcgctctggatgggcgcatgttccgccagcgtttcgagaatggtgcgcatatcgcgaatcggcactttttcatcgagcagattttgcagcactttatgcagtgtggtaagcgtgacgacgccaggaacgagatcttccgtcagctttggcatctcctgggcgacgcgatccagcagctgttgcgcctcctgacgaccaaacagctctgcggcatgctggctaatgaggtggttaagatgcgttgccaccaccgtgctggcctcaaccacggtgtacccctgaatctgcgcctgctctttaagcgcactttcaatccagatagcattcaggccaaatgccggatcgacggtcgcctcaccaggtaacgtcccggcagcggttccagggttaatcgccaaccaacgccccggataagcatcaccactgcctatctccacgcctttcatcaaaatgcgatagcgggcaggttgcagatccatattgtcgcgaatgtgcaccactggcggcagaaaccccatctcctgagcaaatttcttgcgaatactgcgtatacggcccaacaactcaccatcctgctggaaatcgaccatcgggatcagtcgataacccacttccattcccagagaatcttccagttgtacatcgttccacgtcgcttcgacaacggtattattctctgccatttttaccggttttggttcagcaggcgctttttgttcacgtccgcggatccaccaggccagccccagcaatccggcagtgaacagcaaaaataccaggttcggcattccaggcaccaggccgagtaaaccgagcacggcggcgcttaacaacataacgctcgggttactgaaaagctgattcaccatctgctcgccaacatcctgatcggtgctgacacgcgtaacgatgacccccgcggcggtagaaatcaccagcgccgggatttgtgccaccagaccgtcgccaatggtcaatagcgtataactttccgccgcgtgtcccatgctcatgccatgttgcagcacaccgaccagcaacccgccgacaacgtttatgaccatgataaggatcccggcgatggcatcgccgcgaacaaacttacttgccccgtccattgagccgtaaaaatcggcttcctgagtcacttcggagcggcgttttttcgcctcatcttcaccaatcaatccggcgttaaggtcggcgtcaatcgccatctgcttacccggcataccatcgagaacaaagcgcgcacccacttctgcgatacgcccggcacctttggtgataaccataaagttgatgatcacgagaatgacaaacaccacgataccgatagcgaaattgccaccaacgaggaagtgaccgaacgcttcgaccacctttccagccgccgccgcgccggtatgcccttccatcaaaatgatacgggttgaagccacgttaagtgcgagacgcaacagcgtggtaaacaacaggatggtcggaaacgcagcaaactcaagcgtgcgctgggtaaacatcgccaccagcaacaccatgatcgacaaggcaatattgaaggtaaacaacaggtcgagtatgaatgcgggcagtggcagcaccatcatcgacaagatcaacaggatcaaaatcggtccggcaaggatctgccattgtgtcgatttcaggtttgcgggcaggcgcagcatcgcggccagattactcatgggtcggtttctcgttaataaaatccagggcttccggcaccggaagatgagtaggttgtacagggcgctgtccaccagccagacgccagcgtttcagttgccagacccaggccagcacttccgccactgcggcgtacagttgacccgggatttgttgaccgatctccgcatgtcgatacagcgctcgcgccagcggcggcgcttcaagcgtcgggacgttattttcagcgccaatttcacgaatgcgcagcgcgaccagccctgcacctttagcgaccactttcggtgcgctcattttgttttcgtcatactgcaacgctaccgaatagtgggtcgggttattgacaatgacatccgctttcggcacatcggccatcatccgacgccgtgcggccgctcgctgcatctgacggatccgccctttaacatgggggtcgccttcgctttgtttgaactcatcacgaatatcctgccgtgacattcgcagctttttcaggtggctgaagatttggaaaaagacgtcaaatcccaccattggaatgacaccaagcaccaccagcagcgcgcatagccctaccagatccatcgcattacccatggcggtaatcggagactcggccattaagcgcatcatctgcggccagtgatgccagagaaaaaaccccgtcacgctgccaaccaggatggttttcaaaattgccttaagcaactccgcgccagtctgtgccgagaacatccgtttaatgcccggtagcgggttgagtttggaaaacttcggctgcaaggattttccgctaaataccagcccccccagcataaccggagaaataatcgccaccagcaccacgccgctaatcagcggtagcagcgccagcatggcttctctgatcagcagaataatctgcccgaggatcagattcgggtcattgataatactgtgatcaaaatgcagccctgcggagagcatgcccgacaatcgacgggccagcgacacaccgccaaaccagataacactaacgcccaccagcaaaatcagcagtgaagtcagttcacgggaacgcgggatttgcccctcttcccgcgctttttctagtcggtgaggtgtgggggcttctgttttgtcgtcgctctcgtcagacacgtcgccaatcctggaaagagtattaagcgtaaatgatgccagagcgcaaagcgttcaatggtttgagtaaggggcaaaacaggcgggatttagggcttttgccacagcacatcaggcatggtgacatgtttgtcgggtacggcgtaaacgccttatccaaccttgaagatctgatgtgacgcggccacgtcacatcaggcaatacaaatcaaaatccaagactatccaacaaatcgtccacctgatcctgactggctaccacaccggctttgctggtatcgacctgaggtccattaagcaaactctggttttcacgttttggacgcgactcctgttccgggatgttttccaacagcaccatcagcaactgacgttcgatctcctgaatgacgtccatcatccgcttaatgacctgtccggtgagatcctgaaaatcctgcgccatcatgatttccagcagttgcgcgttagtaaagctggtatgtgcggggacatctgccagaaattgccgcgtgtctgttaccagttcacgggcgtcggcaaggtcaatcggatcggcaaaccagtcatcccaacgttgggttaacgcttttgctgatttctccatttgatcctgatgcggttgtgacgcctcaacactgttcagcgcccgctccgcagcctgggcggtcatctgcacaacatagtacaaacgatcgcgcgcatcggggatagcttccgctgcttcggcaatggcctgatccagccccagttcccgcaaactgtcgcgcagcatacgcgtcaggctgccgatgcgcgcaatgatatcgccagctgaatgctcgtcagcaggtttgattgatggttgcatcatagtcgcatcctcacatgcccagtttctcaaagattttgttgagtttttcctccagcgtcgcggcggtaaatggtttcaccacatagccactggcccccgcttgcgccgcagcaatgatgttctctttcttcgcttctgcagtcaccattaacactggcaatgccgacatcgcgccatccgcacgaatcgttttcagcaactccaggccatccatattgggcatgttccagtcggagataacaaatccataaccgcctgcctgcaacttattgagagcgtcgaggccatcttccgcttcctcaacattattgaatcccagctctttcagcaggttacgcactatgcgtcgcatggtggaaaagtcatccacaaccaaaaatttaagttctttatccgccatttcacactcctgatttaaatacgtatcgcctgtccggcactaatttttgccagcatttgctgacttacctggctaagatcgaccacttcgcagacaccacccatattgatggcctcgcgcggcatgccgaacaccacgcaacttgcttcgttttgcgcaagggtccatgcccccgcctgacgcatcgccaacattcccgccgcgccgtcgttgcccatgcccgtcaggatcaccccaaccgcattacgccccgcctgtttggcgacagaatggaacaacacatctaccgatggccgatggcgattaaccgccgggccatcgtgaattttgatttgataattcgcgccgctacgcgccagctccatatgccgatcgcccggcgcgatataggcatgtcccggcaagacgcgctctccgtcttcggcttctttaaccccgatctggcaaagcttattaagtctgtcggcaaaagagcgggtgaaaccgggcggcatatgctgggtaattaacagtgccggactggaaagcggcaacggttgcagtacgtgacgaattgcctcagttccacccgttgaagcaccaatcgcaatcagtttttcagaactcaacaacggccccgccttcagcgttgtcggtgccgacaatggcttatgtgctgcaaggctcgcctttgctgccgtacgcaccttttcagcaatcatttcgctatacgccagcattccttcgcgaatacccagttgcggtttggtgacaaaatctatcgcccccaactccagcgcgcgcagcgtgacttctgaccctttgccggtcagggaagaaaccatcacaacgggcattggacgcaaacgcattaatttttcgaggaaatccagtccgtccatccgcggcatttcaacatccagcgtcaatacatcgggattgaatttcttaatcaaatcacgcgcaaccagcggatcaggggcggtcgccaccatttccatgtcgctatggctgttgatgatttctgtcatgatctggcgcatcagtgccgaatcatcgacagataacaccctgattttgctcatcgttaatccttacttagcgcatacaccgtctgaccacgcagcgtgaagcggcgctcaaggtggctaaagttttcagagtgacccgcaaacagcaatccgtcgggtttaaggagcggaacaaagcggcgcaaaatctcctgctgggtagtttgatcgaagtagatcatgacgttacgacagaagatcgcatcaaacggccccggcacggtgtactgtttcgccagtaaattcagcggggcaaaatcaacatagttcgccagctcctgacgcacgcgtaccagcccttcatgcggtcccgtccctcgcatgaaataccgttgcagttgctgcggcgtcaggtttttcaactcttcatggcgataaataccgcttctggctttttccagcacttcggtgtcgatatcgctggcaaacactttccagcgtccgggcgcggtgcccaatgtatcagccagcgtcatcgctatgctgtacggctcttcgccggttgaagccgccgcgctccatacgcgatactcgccagaacggcgacgtgcgtgatccgcgagcagaggaaaatggtgtgcctcacggaaaaatgccgtcagattcgtggtcagcgaattgataaacgcctgccactcaccgctgtgctgattagattccagcaagttcaggtaatgaccgaaatccgccagtcccagcgcacgcaaacgacgaaccagtcggttgtaaaccatgtcgcgtttatggtcagccagaacgatcccggcgcgttgatagatcaattgacttatccgccgaaaatgcgcgtcggaaagcgccaggcgctcggtcatctgtaacaataaagacgtttgcccacagggcagagatgaagtcatagcgccttctcaatcacttcaggataccactggcgcaatttgtaactgcgccgactcatgtcgtgctacttcatgttcttcaagggtaaataccgccacacgcgacgaaagatggtcggcctgattcagtcgttgcaaatcgtcgcgaaatgcccaaaagacatgccgttactgccaatctgcaagatcccgcagagaatcaaaattaaaaacagcgtggtcgaaattcgaatacgattaaacatcaacgctccccatcaggcggcaatgaccgctttagtaaatactcgtcaaaatgtttcccagtttggatcttgttcagcaattcgcagtcgtggctgtgccggtggttgctcactggcaggacgggatggtgtttgcggtttattggtgagtgggctggctgccagacggaacgcggaaaccgcttgcgttaaacgactcgcctgttcttccagcgcagctgcggcggcagctgattcctgcaccagcgatgcgttctgttgcgtgacgcgatccatttccgaaaccgccaatgcgacttgatcgatgccacggctctgttcatccgatgctgatgcaatctcgcccataatgtcagtcacgcgagtgacagcattgacgatattgttcattgtttccccagcgctttcgaccagcaccgaaccggtatcaacgcgcgagacggagtcttcaatgagggctttgatctcttttgccgcctgtgcactgcgactggcaagattacgcacttcacccgccaccacggcaaaaccacggccctgttcacccgctcgcgcggcttcaacagcggcattcagcgcgaggatattagtctggaaggcaataccatcaataacgctgataatgtcggcaattttcttcgaactatcggcgatctcatgcatcgttttcactacgccatccaccactttgccgccgtgctgggcggtgtcggaggcactttgcgccagttgcgaggcctggcgggcgttatcggcgttttgcttcactgtcgcggtgagctgctccatgctggcggcagtttcttccagcgcggatgcctgctgttcagtacgggaggaaagatcggtgttgcccgccgcaatttcacgggtaccggcatagatggcatctgaaccttcgcgcacatgagtgacggtgtcagtcaaagagcgttgcatatgtgaaacgctctgcgccaggtcgcccatttcactgcgcccgtcaatggtcagggtattcgccaggttaccaccggcaatttcgcgaatatgcgcaataatttttgccagcggtgtaagcaacatacggcgaataccgtaccacgccaccagcagaatcaataccaccaccagcgcgataaccgccagttgccactgggcaaatcggtaatcatctacgttgtcagtgacgatatcgcgatacagtttttcactgctgagggcgtactgagcaaacgcttcgcccattgcattttgcattccctgggttggctgagcgaaataagctccagtattgccataatcaagataatcaatcagttcagttaacgctgtgtgatagtttttatatttttcatcaatattacgactggtagcgaccatttcaggtaacggtgccatgcttttgaattttttataatgagtcgcggcctgggccaatgttttcctggcgctatcgagcaattcaactttggcattactttgctgattggatgaatccatcatcatccgcaccgctgaacgactcaggttaatgcgcgtttgcagcattaaatcccatgttgacgtcagctcgccctgctgttcccgtaattgattggaaaccacaaagctcttctggctatggtgaagggaagaaaaaaacagactgccggaaataagctgtaacagtgcgaatacccccagcaccattaccaacagcgtgactacgcggatacggttaatcataaggcaccttcctgaaaacatgttgatctcgttatcggcaaggaggggggaaactttattgctgatgccacccgccgcgcaattgaaataaaaaacccgatgcgcagatcatcgggttcatttcaattgaggaaatcgggagaattacgccacttctgacgccgcgctatctaacagcgccatctcttcgctgttcagcagtttttcgatgttcaccagaatcaacatgcggtcgcccagtgcgcccagtcctgtgagatattcggttgaaagcgtcacggcaaattccggtgccggacgaatttgctccgccgtcaatgaaagcacgtctgagacgccgtcaaccacgatgccgaccacccgctgtccgagattcaggacgataactaccgtgttgtcgttatagtccacatccacctggctgaacttaattcgtaagtcaacaatcggcacaataacgccgcgcagattcgtgacgcctttgataaacgctggcgtgttcgcaatccgtgtcacctgatcgtagccacggatctcctgcactttcagaatatcaataccgtactcttcatcaccaagggtaaataccagaaattcctggcctgacggctcgctggccagctttgttacattcgtcataccggtcatattgttacctttttactcattcaggcggcggtgttcgccatacgttgttcgcggtttatcgcctgcaaggcggagacatcaacaatcagtgccacgctgccgtcgccaagaatggtcgcagcagaaatgccggggactttgcgatagttactttcaaggtttttaaccacaacctggtgttgaccaattaattgatccaccagcaaggcgtagcggcgaccgccactttgcaagatcaccacaattccctgggtggcttcggttttcgcgcccgcgacgttgaacactttccacagttcgacgatgggcagatattcaccccgcacttccagcacccgctcgccgccagccagtggatgcagatcggcttcacggggttgcagtgattccatgacagcattcagcggcagaatgaaaacttcatccgcaacgcgtacggacatgccgtcaagaattgccagcgtcagcggcagtaaaatgcggatcgtcgtgccagtaccctgcttcgactggatctcgacatgaccgcccatctcctggatattacgtttaacgacgtccatgccgacgccacgcccggagacgtcggtgacctgctccgccgtggagaagccaggtgcaaatatcagcattgcaacttcgtcgtcgctcatgttttcgctgacggtcagaccttgcgaggccgcttttgccagaattcgttcacggtttagccccgccccatcgtcggtcacttcaatgcaaatgttgccgccctgatgttcggcagacagaattaaatttccgacgctgtttttacctgcagcgagccgtttttctggcagttcaataccgtgatcgaggctattgcgtaccaggtgggtcagcgggtcgataatgcgttctatcaggctcttgtcgagttcagtggaactgcccaccagcgtcagttctacctgcttgccgagttttcccgccagatcacgcaccagccggggatagcgactaaagacatattccatcggcatcatgcgaatcgacatcactgattcctgcaaatcacgagcgttacgttgtaactgccccatgctggtaatcaaatcaccatgattaaccgggtccagttcgctggaacgctgggcaagcatggactgggtgatgaccagctcaccgacgaggttaattaattgatcaaccttttctaccgctacacggatgctggtggattcactgctgcgcgtcgttttttcccgctccacgcgaccggttggcgcttgttcggctgccagtttaagcattggtggggtggatatttttggcgagacgtctactgtttcaaaggtaatctgatcggcttcaatcacaaaacagagtaccgcagtgatgtcatcttcggcgatgtcgtccggtaatattgccgagagggaatcagcccctttcaccacgtcagttaacgttgtcagatgccccaactcttcttccagcaggtcgacttcgccggccttcaggcgcgaaaggataattcgtcgcggtgactgactacgactctgctcatcttgcggttcacttttggcaaccacacttaatcgggtcactgcagatggcgtttcgcctttcgcttctaatgccagttgacgtaaggcctggcagatataattgaagctggcggcatccggctcttgcgactgtttataagcgtcgagctgttcttgcatgatgtccttcgtttccaaaaacagattgataatgtcggtgttgagttgcatctcacctcgtctggcttcatcgagcaggttttccatcagatgcgtggtttcctgcaaaacgctgaagccaaaggttcctgcccctcctttgatcgagtgggcagcccgaaagatggcattcaattgttcggcatctggcgcttccggctgcaaaaccagcaaatgctgctccatatcagccaacagttcgtccgcttcatcaaaaaatgtctgataaaaatcgcttatatccatgctcacgctgtcacctcggttcggctgatggcattgtgggaacactgacctgtggtgcaacctcaggtttttccagggcgcttactggctcattctggctttcggcgttttcattcaaaatggcctgttcggcgtgtttgttcagtaccagcaggctgatgcgacggttgacggcatcatcaggtccgcgatcgcttaagcgcatcgttgccgccatgccgacgacacgtaacactttgccgccattcaacccaccaaccatcagttcgcggcgggatgcattggcacgatcggcagaaagctcccagttgctgtaacctttctcaccgctggcgtagggaaaatcatcggtatgacccgagaggctaattcggttgggaataccgttcagtacgggcgcgatggcgcgcagaatgtcgcgcatatagggttcgacgtcggcactgccggttctaaacatcgggcgattctggctatcgatgatctgaatacgtagaccttcctggaccagatcgattttgagatgtggacgtaacgcccgcagtttcggatcggactcaatcaactggtcgagatcgccacgcaatttccgcaatcgactttgctccatgcgttttttcagctcttcgatgttcggctgcttattcacttccccctggctttgggtgtaatcatcacccccaccgggaattgggctttcactattagaaatgcgatcgccgcccgtaaccgcagtcgccagtggagtccggaagtactccgcaatctgaatcagctcttttggactggagatagagatcagccacatcaccagaaaaaaggccatcattgcggtcataaagtcggcataagcaatcttccacgatccatgtgctgccccgtggcttttggctttgcgtcgtttgacgacaataatcggatgcgcttgattcttcatgcttcctcggttgtcgtctgttgttgcggatttttcaccgcacgcacatgctcttccagttcaataaacgacggacgttcgctggaatagagcgttttgcgaccaaactcaacggcgataggcggtgcgtaaccgttcagattagatagcagtgtgactttgacgcactgcatcattttgctggtttcggcgcttttctgacgtaaaacactcgctaatggggaaataaatccgtaagccaataaaatgccgaggaaagtccccaccatcgcatgagcgataagcgcccccagctcggcggcaggacgatcggctgaacctaacgcgtgaactacccccattacagccgcaacaataccaaacgccggaagtgagtccccgaccagcgccagactgttcgccgggacttctgcctcgctttcgtgcgtctcaatctcttcatccatcagagcttcgatttcgaaggtgttcatgtgaccgctgataatcaggcgcagataatcgacgataaattcaagcatgacgctatccgcaaggatgcgtgggtagctggcgaagatctcgctctcacggggattttcaatatcgcgttccagcgaaaacatccccatctgccgcgatttcgccatcaaccgataaagcagagccagcagatccatatacattgctttggtgtatttggagcgacgaaacagcaacggcagcgccttcagcgtgcctttaatcgctttgccattattgccgacgataaacgacccaatccctgcaccggcaataatcaccagttcagcgggttgatagagtgctccaaggtttccaccggtcatcaaataaccgccgaaaactgtaccgagaacaaccaggtaacctaataagataagcacgacatcatccttccactgttgaccatgacaggatgttcagtcgtcaggcgttaacacgcgataggggcaaaaaaagcagcggtacatcgttaccgctgctggaatgtttcgccacaccgtatcagttaaacagcctgtactctctgttcatccagcagttgtgggataatatcggcaggattctgggaaagtttacgtctttttactgcccgggatggcggctgacataagctgcaggcaaagctgccaacaggctggtgagcatgggtaataaaatttccgccgcagcagttgcagctggaaagttgcagtaatccactttcaacaaaccgcaccaatgtccaggcacgggttaatgccagcagcggtccttcttctgcttgcgggcactgttcaaggtataaacggtaggctttgatcaccgcatcgacgccattacacaagccagttttcagtaaaaactgccatgcattacagaacatcgaagcatgaacgttttgttcccaggtcataaaccagtcggttgagaatggcagcatgcctttcggcggtgggcttccgcgcagttctttatagagttttatcagacgtccgcgacttaactgtgtttcgctttccagcatctgcaaacgagcgcccagggtgatcaattccattgccagctgaatatcccgcgcttcctgaacaatgcttttttcactcatgatcaggcccttttcttgcgcagcgcttcttcaggctgattaacatcattcagcaagcgagttgagagcatgatgccggtatgaatttgctggagatcgtcaacgcgggaatcttgcgtcaactgagtaatcgtctggtggctgtcaaaacggaagtgacaaaccagttgattggtttctgccagcttaaccatttgcggaagagtcagtgccgctaacgttgtcgccatttcttcatttatgccgagacgaaacatagcggacgctttgtcctgaacaatcagacgctgtgcaagtagtaaatatgacaagttgatgtcataaatgtgtttcagcaactcggaggtatgcattattcccacccagaataaccaactttatttttatgcggtctcaccgcaccccgtgatgtcgccgggaagccccggtaaaaaataattagcattagaatagttgcgataagctgcaataagcagacccacctttttggtttaataagtccttacaaatagaagggggtctttacacttatctaagatttttcctaaatcgacgcaactgtactcgtcactccacgcacatacaacggaggggggctgcgattttcaataatgtgtgatgcagatcacataaaacgctcaattacttaacataaatgtataagtcatacttttgttttgggtgtatttcaatctgttaaaaaatttttcgctacactggcaagcaaaaatgaaacaggaataatcgaaatgggatgttgcgcacagttaaaataactcaccgtaaataatcatctgctataaataatcgctttaatgcaataccagataagccatttttaaacaaacacttaccgcacaacaaactaattaactacaaagaaaggcaacaatcaacctaatgttaataaaatgttttacatatattaaccacttgttcaatatgggaaatcagtacattattttcttataaatacagttgaaatcatatgataaccaagagcaattgattaattgtatttactaatgaccagactaatatttacctgtttaactgagttgggattgcgtcgtttctccattaggagtaaagctttaatgtcacctgaagttcacagaataaggaacaggttatgagctatagcaatattcttgtcgccgttgcggttacaccggaaagtcagcaactgctggcaaaagcggtatctatcgccaggccagtaaagggacacatcagtttaattactctcgcttccgacccggaaatgtacaatcaattagctgcgccgatgcttgaagatttacgcaatgtgatgcaggaagaaacgcaaagctttcttgataagttaattcaggatgcggggtatcccgttgacaagacgtttattgcctacggtgagttaagcgaacatattctggaagtttgtcgcaaacatcatttcgatttggtgatttgcggtaatcacaatcacagtttcttttcgcgagcatcctgctcggcgaaaagagtgattacctcaagtgaggtcgatgtgctgttagttccacttacgggagattaaccgcacctacgcaagcttaggaaaggtagcaactttatcgcgctgctggctttccgcgcttcgcggaactatctgctttaggtcgctaatgaagcactcctgccagtggttaatatcgtttttcacgataacgtccagcatttctgcatgacgggaaatacgttccgccagcgacatagtcaatgcacgatccagcgcagctgcaacttcgtcacgatcgtagggattaacaattaacgccgacgttaactcgtttgccgctcccgcaaattgcgaaagaacaagaacgcccgggttggctgggtcctgagcggcaacatactcttttgccaccaggttcattccgtcacgcagtggcgtcactaagcccacgtcagagtagcggaatattttcatcagtaatttacggtcaaaatgctgattcaaataataaagcggcgtccagcctaattgcccatatttaccattaattcgtccggcttcattttcgagctgatgacgaatatcctgataggcttgcacatcaccacgagacgttggcgcgatctgggtataacgaattttaccgtgatgttgcggatatttttccagtaacgcttcataggcgagaaaacgctccggcaaacctttggaataatccagtcgttcgacagaaaagatattttgtacgtttttcagttctgctttgagttgcgccagttttggcggcagtggaccggcagcctgtttcgctatttctttcggctcaatgccgatcgggtaaacttccgttcgaaacgctttgccgcaggccgtatggctttttgcgctacgtgtcgtgacgcgggtcaggttagaaaggcaatccaggaacgccagacgatcgttctccgtctggaaacccagcaaatcataatcacaaagctgttcaagcaaggtgtcatatgtcggcagcgcgttgaagatttccggtgtcgggaaaggaatatgcagaaagaaaccaatgcgattattcacgccccgtttgcgtaattcatgcgcaaagggcaacaggtgataatcgtggatccagataatgtcatcgtcttgcaacagcggcagtaatttatctgccagcaacgcatttacgcgtagatagccatcccaggcaggacgctgaaattgcaccagatcgagccgataatgaaaagcgggccagagaacggcattggagaatttgttgtagtattcgtcaaggtcctgttcgctgaggttaaaagaggcccacgtaatgttaccctttttcaccttttttagcggctgatcctcattccctgtttcaccgctccagccaaaccacagtccacctgcggctttcagtgcccccagtatgccaacggcaaggccaccggcactggcggcgtgctcgtctggtggtgcaatccggttagatactacgactaaacgactcatagtcatcactcctgttattttctcttttttgttgtaatgcggtggttatcatttcaagccagctccagacatccggcacgcccgccagtcgccatgatgcctgagttgcacctgtgccaatttttactgacattccgcccagccggttaacgactgcgaagccagattcatcggtcagatcatcgcccagaaatacgggcgttcgcccgataaagggagcttcctgcataaaggcagcaatcgcctcacctttactggtacctttcggtttgatctcgacaacacactttccctgctgtaacgccatttgtggccagatctgagtaatacgttgcgctaatgtcattaatgcgtcttcatgctgcggagcctgacgataatgcagcgcaaaagccatccctttagcctccagctccgcgccgggatactgggcgatgaccgtatgcagttgcacgctaatatcacgcgcaatcgcatccggcagatgaacgatatgcgttttaccattgatgtcacggcgctccgccccatgcacgcccgctaatgggaagcgataaggttttgccagtgcatcaagctccaccattgagcgccctgatatcaatgccaatgcaccatcacttgcggttgccagtagctgaagtccttgcagaatagtgtcaggtacgacgacctgatcgggatgcggtttgatttccgccagcgttccatcgagatcaaaaaaccaggcatatttcgcggatagttcaggggtttcggttaacggttctgtcacccggttctcctccttctcttttcttattgtgttgcgcagaacgcgctttacagacatgtaagtatagacagtgtgacgggggtcgccatttgcaacgaagaacagccaaccgttgtggcggctggctgtggtgggaaaaaacgctaaattgttgtggaaaaaagcatcagacagtgcgtttcgctttttgcttgtaacggtcgaaaatcaccgctgccagcaggattaagccgcgaactacgtactgtgcgaaaggagaaatattaagcaggttcatggcgttttccacggtgcctaaaattaagatacccgccaccacatatgagatttttccgatgccgcctttcagagaaacgccacctaaaacgcaggcggagatcacaatcagctcatagccaatcgacgtcattggctgcccactggtcatacgtgaagccagaataattccggctatcgctgataccaggccagagagaacaaagataataattttggtgcgaacaaccggtacacccgccagacgcgcagcctcttcgttcccgccaatcgccagggtattacgaccaaaggtggttttattcagcagcaagccaaagatgatcagacacgcgacggtgagccagattggcgcaggcagaccgaaccagttggcgtaaccaagggcaaagaagctttcatcttcgataccgaccgctttaccgtctgaaatgatgtacgccagacctcgaacaatctgcatcgttgccagtgtcgtgatcagggcatttattttgagtttggcgataacaaagccattgaccagaccacagagaatgcccagcagcaaccccgctgccacgccaatccacaggctttcagtcagattaataaccaccgccgtggtgacacccgcacaggcaattacggaggcgacagaaaggtcaaagtcaccggaagcaaggcagaacaacatgccacaagccaccatccccgacatggaaattgccaggcccaaccctttcatattaatgaaggtggcaaaatttgggacaaaaatggcacaggcgataaaaagcaccgcaaacaccaccagcatgccgtactgatcccagatacgcccgaagctgaatgacgacttaggtgcgccagaacccgatgtagaaacagaagacatcatactctccttactcaggcaactgcctggctgactttaggcatcgcaaggctcagtgcctgacgctcatctgcctgctcgtgtaacaattcaccggcgatttcaccttcgcgcatcaccacaatccggtcggcaacgccgaggacttcaggtaagtcgctggaggcaaacagcaccgccaccccctgcgccgccagcgcataaatcacgttatatatttcgtgcttagcaccaacatcaatgccgcgcgtaggttcatccagcaaaatgaccttcatctcttccgataaccagcggcccagaatggctttttgctgatttccacctgagagattcataatcagttgctcagcgcccggcgttttgatgttgagcgaacgaatgtggtgatcggcattgttttcttcccaaccgttgttgattacacaacctccaagcacatgtttacgtctggcactgatgttgatattgtcgcgaacggagtgcacgggaataatgccttccgctttgcgatcttccgggcagagcatcatgcctgcggcaatggcgtggctcggtttacgaatatcgatcggctgttggtcgatataaacctgaccggcggtgatttgcgtcccgccaaacatgcctttcattaattcgctacgccctgccccgaccagaccaaacagaccgacaatttctccactgcgaaccgccagacttattggcgtacgcacgcctggtgctttcacagcatcaagacgcagccgctcctcgccataactacgcggttgccagccgtagatatcgccaatgtctcgcccgaccatcgcctgcaccagtgcgtcgtggtcaacctgctgcatatcggtaaaggttttgacataacgcccatctttaaagacggtgatggcatcgctgagggcaaatatttcttccatacggtgagaaacgtataagatcacccgcccctcttttcgcagttcacgaataacgcggaaaagattgtcgatttcgcgggcagagagggagctggttggctcatcaaaggcgataattttggcgttacgcgccagcgctttggcgatttcaaccatctgccactgaccaatggagagatatttcagcggcgtgtccgggtcaatatccataccaagatgtttaagttgtaaacctgcctcataattcagcaatgaacgattcacaatgccgcctttatgcggcagctggccgagatagatgttttccgcgacggtcatttccggcacgagatgcagttcctggtaaataatcgccacccccgcgttaagtgctgcggtcgtgtcggaaaaggacatttcctgcccattaatcactacagaacccgtggttggcgcatagtttccgctgaggatttttaagagagttgattttcctgcgccattttcacccatcaacgcatgaacctgaccggcatagcagtcaaaactaatatccgtcagcgccttaacgccgggaaacgttttaccgatgccgcgaaatgagagatacggggtagactgttgcataacgtctccgtgaatcactggtcgttcacaccccctctgcatcatgcagaggggaatttttccggcaaattacttaccacctaaaccttttttctccagttcttctttaaagttgtcacgcgtgatcagcaccacgtcggtaacttcggtgaatttggtcggttcaacaccttttgcaacccagttgtaaagcatttcgctggacttataaccatgtacgtccgggcttggcagcagggaaccgtagaagccggttgcctgtgccttagacagttcactcaccgcatccacaccgttaataccgataccgatgatattgctcgctttaaagccctgaccttccgtcgcgcgtacgccgcccagcacggtgctgtcgttcataccgacaatcagccaatgtttaacttccggatgttgaaccagcattgagttggcagcgtcaaatgcccccgggatgtcgttagatttggtaggtacctgataaatttgtttttccgggaatcctgcagctttcagcgcatccatagaccccgtagtacggcgacgagccgtatccagttcgttggaggtaatcgccatcaccgcgctttctttgacatcccagccacgtttctgcatctctttatacagttcctggccctgacgttcgccaattttggtcgcagccatcatcaccagcggaacggtatccattggcttacctttggcgttaacaaactggtcatccacggcaatgactttcatatcgtagccacgcgctttcgccacgatggcagagccgagtttcgggtccggagtacaaataacgaaacctttcgcgccactggcagccaggctgtcgatagcgttcaatgttttttcgccatccggcacggcaatcttaataacttcaaaccctaaatccttcccggctttatcggcaaacttccattcggtctggaaccacggctcttccggttgctttaccaggaaaccgagcttcaggttctccgccatagcggattgtgacataacggctgccagaccaatggctgccagggctttagtaaatttgtgcatggttctctccagctttagtgtcgttttgtgtagggcaaaaacgaatgacattcgttaaattaatcggaaaacaaagcattaccttttaactaaaagataagtgactgtgttgacatagttttagcgagaaattaattctccataggagagcaatatcacatcgcagaattacagtgagaacgtgcataaatttagcgggaaaagacataaggaaaagcgaatttgtcagacaaattatcgagtgcacagcagaataatccataagattagcctggaagtccttgttgtctttggtacccatgcgggatgttttctttttaaccagtcaataggcctcattacctggcgttgagtttttgcaatggtgtaataaccgcaacttaaagatgtggaaaatgcgcgtcattcatttcgccattaattatcactgtactcattaattaacagaacacgtataatgagagccatatcgcaaaaatgaaaaaacgttttataaaatcattgcttcatcatgaattcaaattcatcgattaatatcaacaagatacaaaaagcaccatcattaaaattcattacagttacattgatttcatcaatgaaatgtaaaaatatataaacttgatgatttaagcattttcttatacccgttcagacgttattcttatttcagatcatcgtcagaattgactccacgatcacatttcggaccggcagaaaggaattattctgcaaacagtaattatggtgttttgatttatcttgcacctctccacttctggatataaggatattaggtatggcaaccgctggaatgcttctcaaactcaactctcaaatgaaccgcgagttttacgcatccaatctctaccttcacctgagtaactggtgttctgaacagagtctgaacggcaccgccactttccttcgcgcccaggcacagagtaatgtgacccaaatgatgcgcatgtttaactttatgaagagtgtcggcgctacccccatcgttaaagccattgatgttcccggtgaaaaactgaactctctggaagaactgttccaaaaaacgatggaagaatacgagcaacgttcaagcacgctggcgcagttagccgatgaagcgaaagaactgaatgatgattcaaccgtcaatttcctgcgcgatctggaaaaagaacagcagcatgatggcctgttactgcaaaccattcttgatgaagtgcgcagtgcgaaacttgctggtatgtgtcctgtgcagaccgaccaacatgttctgaatgtcgtgtcgcatcagctgcattgatcatacatcggcgccaatgcattgcgccgatgaagtttttgagaaaccgctgcctcatttttttgaagcagcggttttttaatgggattcgccctgtggggtaaacttgagttcaatcaacgcgatggctttttggattgcccgcatggtgaccgggtctgcggcggcgggatggttagtaaagtcgatattcttcagctggctggacattttttcgcgaacttcaacgggcgcgatcacatcgagaacatccagaatttgtttgataaccaactggcaagcaaccacatcagaaaccagttcctgatcggcattcagcggctgggacatcgtaaactcctgatagcattttgaaagccgttatagtagcggcttcacatcttcagcgatagtcacatccaccgtcatcagaacacaaaaaaacctgccggagcaggttttttgttatcggaacatattgcctggcggtacgtctttgaacgtcttgcaatagttattgaacatacttttcaggatcttgcgcagtttcatcgcggtactccgaccatttgttatacaggtgttattgtctttgcgtttataatatgacaaccatcacaaaaatcaatctttatgtgatgtaaatcacataaatacccctttaatgttataaaaatgataatcaaaaagcagccccccaatttctgacacatacagatggcaagaaatagcgcctgccaggcgtcttttccggccattgtcgcagcgctgtaacgcgtaaaatactgctttcttttactcttctggctggaccatgagacttctgattctgactctttccttaataacgctgacaggatgtacggttactcgccaggcccatgtgagcgaagttgacgcggcaacaggtattgttcggttggtttatgatcaggcttttttgcagcatgcccgtaccgatcgttatgtcagtcgcgggatcgccgatcgcgcatgccagcaggcaggctatacccacgctatcccctttggtcagccagtaggcaactgtagcctctttgcgggttccttatgtttgaatacggaattcactttgtcatatcagtgccatcattccgccttccctgtctttctctaaacgttttaatcagcgagggggatcttcgctgattaaataaatagcggtaatgcgttttattcccattcgtatttttaataaatgatgtttatattttaccttttgcaaataataaaataacaaattatagtgacgccacagcaacaaatataacctttgtggagcactatcatgctgaaaccagaaatgattgaaaaacttaatgagcagatgaacctggaactgtactcttcactgctttatcagcaaatgagcgcctggtgcagctatcataccttcgaaggtgctgccgcgttcctgcgccgtcacgcccaggaagagatgacgcatatgcagcgtctgtttgattacctgactgataccggcaacttaccgcgtattaataccgttgaatctccgtttgctgaatattcctcacttgatgaattattccaggaaacctataaacacgaacaattaatcacgcagaaaattaacgaactggctcatgctgcaatgaccaatcaggactacccaacatttaatttcctgcaatggtatgtttctgagcagcatgaagaagagaaactgttcaaatcgattattgataaattaagcctggcaggcaaaagtggcgaaggtctgtattttatcgacaaagaactctctaccctcgacacacaaaactaatgctctccggcggcaggttttctgccgccgtttcaaatcagtgacggcaaatcttactctgatcggttgaaaaaccttcttctgaaggtataaatttgccttttgctgccagaaacgccaccaactctcccgcagtcatcccttctgccgagcaggtgtgaaaacgtgcctgttcaccaaaacgcgctttaattgctgcttccagactggcatgcgtatattgctcgcttgattcaatcatcatatttaacacttcatgaccgtgaatagagtccatcgttcctcctcaaaaaaagcctagcgtagcgattgctgcttatgaagactttgcgccagcgcagaactgaacgctttttattgtacatttatatttacactatatgtaacgtcggtttgacgaatcagccgttatgccttaacctgcgccgcagatatcactcataaagatcgtcaggacagaagaaagcgtgaaaaacagaactctgggaagtgtttttatcgtggcgggaaccacaattggcgcaggcatgctggcaatgccgctggctgcggcaggtgttggttttagcgtcacgttaatcttgttaattgggctttgggcattgatgtgctacacggcgctattactgctggaggtgtaccagcatgtcccggcagataccggtctgggcacgctggcaaaacgctatctgggacgctacggtcagtggctgacgggcttcagtatgatgttcttaatgtatgctctgactgcggcatacatcagcggtgccggtgaattgttggcctccagcatcagcgactggacaggtatttcaatgtcggcaaccgctggcgtgctgttgttcacttttgttgccggtggcgtggtttgtgtcggaacttcgctggtcgatttatttaaccgttttctgttcagcgccaaaattatttttttggtggtgatgctggtattgctgctaccgcatattcacaaagtgaatcttttaaccctgccgttgcaacagggactggcactgtctgcaatcccggtgatttttacgtcgtttggttttcacggtagcgtgccgagtattgtcagctatatggatggcaacattcgtaagctacgctgggtgtttataatcggtagtgcgatccccctggtggcatatattttctggcagctggcgacccttggcagcattgattcaacaacctttatgggattgctggctaatcatgccggattaaacgggctgttacaggcgttacgcgaaatggtggcctctccgcatgttgagctggcagtgcatttatttgctgatttagccctcgccacgtccttcctcggcgtagcgttaggcttatttgattatctggcagatttgtttcagcgttcaaataccgttggtggacgattgcaaactggtgcaattacctttctgccgccactggcgtttgcactgttttatccacgaggatttgtgatggcgctgggttacgccggtgtggcactggcggtactggcattgattatcccttcgctgttgacctggcaaagcaggaagcacaatcctcaggcgggttaccgggtgaaaggtggtcgtccggcgctggtggtggtgtttctctgtggtattgctgtgattggcgtgcaatttttgattgcggcaggcttgttaccagaagtgggatgattagatagcctcaaattccttattgggtgccagaattaacgctgacacccaatgtgacctcttaatgcaggcagcactgcttaaatttcttaccactaccgcacggacaaggatcgttacgccccggtttctcttctgctttgatcggttgctgaacagctttttcctgcggatgcgccatccagtatgcatgtaaatcaagcgccgccagtcgaattgcatctacgctctcttcaaacgcttctggcgacatcttctctacccgctcgaagttttcctcagtaccgtgcagcgcaatcgcctccagcgctggttttaacgaatcgggcaacgttgaccagtcagaaagtgccacgccccgcatatagccaaagcaccactcctcaacaatcgtcagctcgctgccatcgacttctcgcaagccgaataacggctcaaactgctccgggaattcgttcagacgctctgcggtatcggccatatgttgaaaagccaggttcataaagcgcgtcatctctttctctgacgcccagcgcggcacatagtcagccccaccccacacggcaaccagccactgtgccggttcaatctcttgcggagaactcaacaccgccgtcaataaaccgtccagctccgccacatcaagaatggcgtggtcagtgttgtatttggtcagaatatcgtccagccattccaactcactttcgtttaacggtcccgttttcatacgcttttccttgtggatctcaactcgccagcacctatcttacatgccggtccgtatcagagatactttttgagtggctttgccggtgattaaaaattaaggagggtgtaacgacaagttgcaggcacaaaaaaaccacccgaaggtggtttcacgacactgcttattgctttgattttattcttatctttcccatggtacccggagcgggacttgaacccgcacagcgcgaacgccgagggattttaaatcccttgtgtctaccgattccaccatccgggctcgggaagaaagtggaggcgcgttccggagtcgaaccggactagacggatttgcaatccgctacataaccgctttgttaacgcgccaaattcttcaggcctttcagccagacatccgctgacgccgatgccttttaaactggagcgggaaacgagactcgaactcgcgaccccgaccttggcaaggtcgtgctctaccaactgagctattcccgcattcatcaagcaatcagttaatcacttgattttattatcgtctggcaatcagtgccgccgttcgatgcgttgcattctacttacctggcgcgatgagtcaacgatatttttcaccacttttgatcgtttgctgaaaattgcgccgaaacgatcactgatcaagcaaatctgcacgcgcagcgctcaaatattgcaacattgaccacagagtcagtaccgcagccacaaagaaaagtgcaataccggcgtactcaacccaaatgttcggacgccacagcagccaggctaacgccaccatctgggcagtggttttcactttcccaatccaggagacagccacgctactgcgtttacccaactccgccatccattcgcgtagcgcagaaataataatttcacgggcgatcatcgttgctgccggtaaggtcacccaccagctgtggtaatgctcggttaccagcaccatggcgatagccacgagaactttatctgcgacagggtcaaggaaagcaccaaaccgggtactctggttccagcgacgtgccagaaaaccatcgaaccagtcagtcaccgccgcgacgcagaaaatgagcgcggcggcaaacggcgaccaggtgacaggcagataaaagaccaatacaaagaatgggataaggatgacacggaacagtgtaagcaacgtagggatattaaattgcataatgacgggtaactatctgttgtcagtaagattacccctatgttgctacagagacatcaatgtttcaacgaccagaagatcttttctgccagaccttgcgaaatacccggcacttttgcaatttcctcgacgctggcgttacgtaaaccttgcaaaccgcccatatatttcaacaacatttgccgacgttttggcccgacgccttcaatggtttccagggaactggtatttttgaccttcgcccgttttttacggtgcccgccaatcgcgtgatcgtgtgattcatcgcgaatatgctggataacatgcagcgcgggagaatctggcggcaaactaaatccctcaccttccggctcaaagaacagcgtttccagcccagccttacgatctgctcctttggcaacaccaagtagcagcggatgatttttatcccatgagacatccagttcggcgaagacatttttcgcctgcgcaagctggcctttgccgccgtcgataagaatcacatccgggatcttactgtcgtcaatggctttaccataacgccgacgcagcacctgattcatcgccgcataatcatcgcccggcgtgatgccagtaatgttatagcgccgatactccgcacgcagcgggccgttagcatcaaacaccacacaggaagcgacggtttgttcacccatggtatggctgatgtcaaagcactccatccgcttcacttccggcaatttcaacacgctggcaagcgcggtcagccgctggtgaacggtagattgctgcgaaagtttgctggttaaggccgtcgccgcattggtgcgcgcgagtttcagataacgcgctctatcgccacgaggtttggtttgaacattaatcttgcgtcccgccagttctgaaagggaatcggcgagcagcgttttatcgctaagattaaaatcgagcaggatctcacccggtaaggtgcgcatctggctgccttgtaaatagaactgacctacgaaggtttccaccacctcgctcagttccgtaccgccaggcactttcgggaaatagctgcggctgccgagcactttgccctgacgaatgaacaatacgtggacacaagccatacccgcatcgaacgccacaccaataacgtcaaggtcgtcgccggtattggaaacaaactgtttttcggtgacacgtcgcaccgcctgaatttggtcgcgaatccgcgccgcttcttcaaactccagattctggctggcagtttccatacgactaatgagttgcgtaagcacctgatcatctttgccagacaaaaacaggcgcacatactcgacctgctgagcgtattcttcttcactcaccagtccttcaacgcacggccccagacagcgccctatctgatattgcagacacggacgcgagcggttgcgataaacactgttttcgcactggcgaatggggaaaatcttttgcagtagcgccagtgtttcacgtacggcatagccattcgggaacgggccgaaatattcacctttggcatgcttcgctccacgatgcatcgccagacgcgggtgggtatcgccactcaggaagataaaaggatatgatttatcatcgcgtagcaaaacgttgtaacgcggctgataaagtttgatgtagttgtgttccagtaacagcgcttcggtttctgtatgagtaaccgttacatcaatttgctggatctgggcgaccagcgcttcggttttgcgcgaagcgaggttgctacggaaatagctggaaagccgttttttcaggtctttcgctttgccgacatagataaccgtaccaccagcatcgtacatgcgataaacgcctggctggctggttacggtttttaaaaacgcttttgcgtcaaactgatcactcactgacttgataatgtctccgcattacacagaccatggcgaattgccaggtgagtcagctcaacatcgccatgaatgtttagtttactgaacatacgatagcggtagctgttcaccgttttcggactgagattgagctgttctgagatctcattgaccttctggcccttggtgatcatcagcataatctgcaattcacgttcagacaaactggcaaatgggctttctgttttttctggttcgatctggcttaacgccatttgttgagcgatatcagaagcaatgtaacgctgccctgaatagacagaacgaatcgcactcacgacttcctgcggagccgcgcctttgctgaggtagcccgcagctccggcctgcatgactttcgctggtaaagggttttctgtatggacggtaagcatgatgattttgacatcagctgtggaacgcgcgattttacgcgtcgcctcaagaccgccaatgcccggcatactcatgtccattagcaccacgtcaacggcatttgcccggcaccatttaacggcgtcttcaccgcacgatgcctcaccgacgacttttataccctttatatcttccagaatgcgtcgtatccctgcgcgcaccagttcgtggtcatcaacaagtagaacgttgatcaaaggaatatctccagaaatagggataacgctactgatagttagtcattcgtatattagcggtttttattgcaactttgaaacgttaaaaatggtgggtattcgatttttctctcgtttttgtcaattcgattgtccacagttatggtcacgcccgtcaccaacggcttccgggatcgtttcacagtaagcccggcgatgaaatgtgacaaaaattgactttattcagcaaaaatgaaaatcagcccgctgaatatgtaacattaattaacccgaacaatacgggcaaaaaacattcatgataaaaatatttattggtcattatattaacgtattttatagtactgttgatatcgcgctcaaaaaacaaccactgctatttttagcaaagcttatggtatactccgccgccttaacatttttcaccgcaaattttcattgcaacatgacgaggaaaataaatgagtacgcctgatttttctactgccgagaataatcaagaactggcaaatgaagtctcctgcctgaaagcgatgctgacgctgatgctgcaggcgatgggacaagctgacgcgggccgcgtgatgttaaagatggaaaaacagcttgcgctgatcgaagacgaaacccaggctgcagtattttccaaaacggttaagcaaattaaacaagcctaccgtcagtaatataaaaccggctgagagcgtgcctttcagccggtttttgcatctggcacgcagaacagaaaagagatcaaattaagccagtagcggccgcgtaacaggcaacctgcgtcttattcggtgcattgatttttttctgcatgtttttctgatggaaattgaccgtattctcagagattgacaaaatcatcgctatctctgctgatgtcttaccttccgccgtccatttcagaatttctttttcgcgcttgctgaaattcatctctggcgtcatcactatttcatcatttaaacgcatcagagccatcagactttcgcgcaccagtagctgcatttttaattgcagttcatcactaagaatgggtatttcgcgcgtgctgcaacgggaaaaggacaaaaagcccaacgcccgatttggcagcattaaatactgagtgacaccgcggcgtaaaccatgtgcgcgcgcagcttcccataacggctgtgcttcgctgaataagtcatcattccacattaaatggccctgactaaagttttcagggttcagcaccggatcaattgcgagaaaattttttgcctgataataactaacccacgactcagggtaattggtgtagaaagccactttaggtcgcgtgaatggtaccgggtggcgaacacataacgaatagtaatcgtactccagctgctgagcctgaagctctatttcatggtagacctcttctgcggcctccatcctctgaaaacgcaacaacatcgtgcgaagccagctgaaaaaatccgtatcctgcatagtaaaccgcaacgcccctgagagtgagtatcatttataatgataattcaaactatcacataaataagatttatatataatttatattattcaggcaatgaattacttttgcaagccatcgcattctcttatgttattaatgagttatgctgatttgttaagcagttttatcacgtttgaaatggcgtcccgccccgactggtgaatcgtcggggctgattttttcttattattgcagcagaaacttctccaggaactggcgggtgcgaggctgctgaggatcagcaaataacgcttttgctaccccctgctcgactatccgcccctggtccataaaaatcgcccggtccgcaacatcccgggcaaagctcatttcgtgcgtcacaatcaccatcgtgcgcttttcctgcgccagctgacgaatggtgttcaggacttcgcccaccagctctggatccagcgccgacgttggctcatcaaacaaaatcacttcaggacgcattgccagagcacgcgcaatcgcaacgcgctgctgttgaccgccagacaaacgacgtggataactggtttctttaccggccagcccaactttcgccagcagctcgcgagcgcgcgccgtggcctcttctttcggttcgcctttgacgatcaccggcccttcaataatgttttccagcaccgtacgatgcggaaacagattaaagttctggaagacaaacccgacgtgctgacgcaactggcgaatcagcgatttttgctgacttaatgaacgtgcagtatcaatagtgatatcgccaacggtgatggttcccgcttccggttgttccagcagatttatgctgcgtagcaacgtggttttgccggaaccactcggaccgataatagccactacttcgccaggcttcacctcaaggtcgataccatgcagcaccgtctgaccgtggaattttttcaccaggttcttaacttcaatggcactcatttgggttccctctcctggcgattaagttgattctcaaaatggttctgcaacgtcgataacacagtcgccataatccagtagatgagcgaagccgccaggtacatggtgaacacctccagcgtgcgcgaggtaatcaactgagcctgacggaacagctccggcacctggattgtcgcggccagcgacgtatcttttaccaggctgataaagctgttcgacagcggcggcaacgccacccgcgccgcctgtggcaaaatcgcgcgacgcatggtctgccatggcgtcatgccaatactggctgcagcttcccactgacctttatcaatagaagaaatggcggcgcgcagcgtttcggcagcataggcggcagtgttcagcgacagaccaatcattgctgacggaatgggatctaattcgataccaaactgtggcagtccgtaatagatcataaacagttgtgcgatgagcggcgtaccacgaaaaatagagatataaaaacgcgccagccagcgcacgggccagattggcgacaggcgcatcagcgcgagaataaacccgagcagtaagccaaaaaacatgccgccgatactgagttgcagcgtatacccagcccctttcagcaggaacggcaaggaatcaataaccagttgtatactttcttgcatgagcgttcccggagctaaacgtggggatgataggcgaacagcgcaggcgcaccgccggtatgaataaacaaaatcggcccttcatctttgaagcgtttctgactgataccgtcaatcagccccgccatcgcttttccggtatacacaggatcaagcagaatgccttccagccgcgccagcaatttcactgcttccatgccttcgtcgttcggcacgccgtagccaggtgcaaaatagtcatcccagagtaaaatttccgctgatgcggtcagctccagttctttcgcaatcgcctgttggaggttaaccactttcggcaattgatcggcaacagaacgcgacacagtcacgccaatcagttcgctttcaggcatcaggtgttccagcccaacagccagtccggcgtgagttccggcactgcccgacgcgaccaccaccgacgaaatattaactgccccttcacactgttgcgcaatttccagcgcactctccacataacccagcgcgcccaaagcattagaaccgccaaccggaatgacatacgggcgaaagccttgtgcttcgactcgcgtcgccagcacttccagttgggcattgggatcggtcagtgcgtcgcacatttcaatctgggtattgaacagatccagcaacaaacgattgccgttggttaaatagttttctgcggttgtgccaataggattttccagcagcgccacgcagtgcagaccgagtttcgccgcaactgcggcagtctggcgcacatggttagactggatcgccccggcagtaatcagcgtatcggcaccttcacgcagagcatctgccgcgagaaattccagcttacgtaatttattgccgcccattgccatgggagtgacgtcatcccgtttgatgaaaatttcccgtccaagataatcagaaaagcgcggcagatattcgagcggcgttggcgcgccgataaactccagccgtggaaaacgggttaaattatgcagtggcataacagcctccgatgtgtgttgttgtgattttcttattatgcacgctgaaaacgcgtaaataaaaaaggcgctagtgaaagcgcccttttttgtcattatgctgattatttggtcacatcagcaccaaaccatttttcggaaagggcttgcagagtgccatctttttgcatttccgcaattgcatcattcaccgctttcagcaggtcttcatttcctttacgcagcgccacaccagactcctgacgggagaatgcttcaccggttactgccagcgtatcgttggttttcttcaccagatccagcgccgccagacggtcaacgaggatcgcatcgatacggcctacgcgcagatcctgatatttggtcgggtcatcatcataggtacgcacatcgacgccctgaacattctgacgcagccactcttcatagttggtgcccagaccgacacccacttttttgcctttcagatcatcagccgttttaatggtgccttcgttaccttttttcaccagcgcctgaataccggaaatggtgtacggggtagagaaatcgtattttttcttgcgctcgtcagaaatggtgacctgattaatcaccacatcaatgcgtttagagtccagcgacgccagcataccgtcccatttggtcggttttagtgacgcctcaacgccaagatgttttgccagctgttgggcaaattccacttcaaaaccggttaatttgccgtcatccccctgaaaactgaacggcggataagttccttccagccctaccagcagcgtgccgcgctctttgactttattaagcagaccttcatctgcaaaacttttaacgctcatacccgcaaccagcgccacggccatcacacccatcaatgcctgacgtcccagatgtgctaatttcatatttaccccgaatgttgttatgtctgtttgcagtgtagagccattgtttgtaaacacaaaaacaactccgctacatcttattcttatttaatatatatcagaagcaggcaggctggaggatttctgcacaagtccggtacaggtttggcgctgatagtgttgatacttccgtaacgcgatgcggtaattgttggtgctggtggagggcagccacggggcgaggatttcatcaaggaaaccgtcctgcagctgatcgagggaaatattttgctcgtgtagatgattccccaaacggcgcaaacgaacgacatattcacgcaccgtaccagggctcatttcagtttgctcaaaaagaaattgcttaaagccgataatatcgaaaaaatcactctgcgttttgcaatgtaaatcaccgcaaaatcggcacaatgccgcccatgattgttgttccacttgccagccattttcatcaagcagcgtgtccaggcgggaaatctcgattttattcactattttgccgtcgcgaacgagggtaatgcgatcgagtaatttacggcaatgcgcgcaatgggtctggctgtgtttaaagtctttaagatagcggcttaatggccgtcttttcaggtgctgcaccatcattaagaactcctggtagtcaaaattaaagtgcggcatttactgacgttataacttacccagtttagtgcgtaaccgtttaatagcctggctgtgtaactgactgacccgcgattccccgacctccagcaccgcgccaatctctttgagattcagctcttcctgataatagagggttaataccagtttttcgcgctccggcaacgtttcgatggcttccatcacccgctggcgcagattactgtccagcagttgttgtagcgggttttctcgctgatgatcatcagtaaccagttcgatgctatcgccgtgctcttcgcgccactcatcgtaggagaagagctggctgttattggtgtcgagcaacatttggcgatagtcggcaatatcgatccctaaacgttccgctacctcagtttccgtggcgttgcggccaagttcctgctccagttgccctattgcctgtgccacttcacgcgcgttgcgtcgcacgctgcgcggcacccagtcacggctgcgaagttcatccagcatagcgccacggatacgctgcactgcgtaagttgtaaatgccgttccttgtagggcgtcatagcgttcgacggcattaagtaacccaatgccgcccgcctgtagcagatcgtcaagttccacgctcgcgggcagtcgaacctgcaggcgcaatgcttcgtgacgcaccagcgggacataacgctgccacagcgagtgtttatccattacaccttcagcggtatagagtgaattcacgataaacagccctgcgttatatgagttatcggcatgattatccgtttctgcagggtttttaatcggacgattagtgggtgaaatgaggggttatttgggggttaccggtaaattgcgggcagaaaaaaccccgccgttggcggggaagcacgttgctggcaaattaccattcatgttgccggatgcggcgtaaacgccttatccggcctacaaaaatgtgcaaattcaataaattgcaattccccttgtaggcctgataagcgcagcgcatcaggcaatttggcgttgccgtcagtctcagttaatcaggttacggcgattaaccctgcagcagagacagaacctgctgcggtacctggttggcttttgccagcacggagttaccggcctgctggataatctgcgctttcgacatgttggacacttcggtcgcatagtcggcgtcctgaatacgggactgcgcttcagacaggttggtagtggtgttgttcaggttggtgacggcggaatccaaacggttttggatagcccccagggatgaacggaatttgtcgatggagctgatagcttcatccagagctttcagtggatcttttgttactgtgccttcgctagttgcatctgttgttaaagtaccattagcactaacatatacttcagccccgactttcggcgcatatttacccgtaccagttccagaatcaacagttaccttgccgttgttagcatcgattgaatacttcgtggtgtatgaaccaattgtagtcatttcaccatcagcatctgtgtatgttgctgttgcattagaaacgtcagtattatcggcatattttgcgctagcagtaccgtcacctgcggcaaataccgcctgatacgtctgaacgccagatttataggtaattgttgcggatgtatcaccgttagctgcaactgctgtgccttgtttagctgtagccactttatttaaaacggtttctttgctagctgtatcagtgaacgatacccctgcgttagcagttgcagcaccagcatcagcacccgttttaaagttataagttgttccccccatcgtgactgatgcagtcttattaaacccgattgattgaccatcaccagctttcttgaataaaccatcaagcgtagccgcagtcgcaccaccagcatcgtttgtagttaagttaccatcactagttaaataggcttcctgtcctccgattgtaattttaccattcgcatcaacatcaaagttcacttcaccgcttgctgctttgtaaacaccactagcagtttgcccagccggcgggagaaggctagctgctacatcacctgcttttgctgaagtattattcgatacattactgaatgagaagttaccagcagatgcattgtatgtatagaccgtggcagtttgagctgcatctgctttgatagtaacagtgtcaccatctttcagttgatcaagggcctttgatgcagtcagcgcattatttgttgtagttatagtattagttgcagcatccattttcgctgctgtcaggtcgctaatggtcgccgctttattggctatcgtaccggaaccattcacgttaaaaccattcagccccagcgtatcagagtcaattttcttcagatcaatagtgatagtctggccgtcgttcgcaccaacctgaattttcatcgaaccgtcttttgccagtacgttcacgccgttgaactgggtctgaccggatacgcggtcaatttcgtcgagacgggatttgatttcgtcctgaatggagtccagatccgaatcagagttagtcccggtagaagcctgaaccgtcagctcacggatacgctgtaagttgttgttgatttcggacagcgcgccttcagtggtctgtgcaacagaaataccgtcgttggcgttacgtgcagcctgagtcaggcctttaatgttagaagtaaaacggttagcaatcgcctgacccgcggcgtcatccttcgcgctgttaatacgcaagccagaagacagacgctcgatagaactcgacagcgcagactggttcttgttgatattattttgagtgatcagcgagaggctgttggtattaatgacttgtgccatgattcgttatcctatattgcaagtcgttgattacgttttgggtttccacccgtcggctcaatcgccgtcaaccctgttatcgtctgtcgtaaaacaacctttagaatttttttcacaaacagccattttttgttagtcgacgaaatactcttttctctgccccttattcccgctattaaaaaaaacaattaaacgtaaactttgcgcaattcaggccgataaccccggtattcgttttacgtgtcgaaagataaaaggaaatcgcatggcaagtatttcatcgctgggagtcgggtcaggtctggatttaagttcaatccttgatagcctcaccgccgcgcaaaaagcgacgctaacccctatttcaaatcagcaatcgtcgtttaccgctaaacttagcgcctacggtacgctgaaaagcgcgctgacgactttccagaccgccaatactgcattgtctaaagccgatcttttttccgctaccagcaccaccagcagcaccaccgcgttcagtgccaccaccgcgggtaatgccatcgccgggaaatacaccatcagcgtcacccatctggcgcaggcgcaaaccctgacaacgcgcaccaccagagacgatacgaaaacggcgatcgccaccagcgacagcaaactcaccattcaacaaggcggcgacaaagatccgatttccattgatatcagcgcggctaactcgtctttaagcgggatccgtgatgccatcaacaacgcaaaagcaggcgtaagcgcaagcatcattaacgtgggtaacggtgaatatcgtctgtcagtcacatcaaatgacaccggccttgataatgcgatgacactctcggtcagcggtgatgatgcgctacaaagttttatgggctatgacgccagtgccagcagcaacggcatggaggtctcggtcgccgcccagaatgcacagctgacggtcaataacgtcgccattgagaacagcagcaacaccatcagcgacgcgctggaaaacatcaccctgaacctgaacgatgtcaccacaggcaaccagacgctgaccatcactcaggacacctccaaagcgcaaacggcgattaaagactgggtgaatgcctataactcgctaatagataccttcagcagcctgaccaaatacaccgccgtagatgcgggagctgatagccagaattctagcaatggcgcactactcggcgactccacgctgcgaacgattcagacgcagttgaaatcgatgctgagtaataccgtcagttcttccaactataaaacgctggcgcagattggtatcacgaccgatcccagcgatggcaaactggaactggatgccgacaaactcaccgctgcattgaaaaaagatgccagcggcgtaggtgcattgattgttggcgatggtaaaaaaaccggcatcacgaccaccatcggcagcaacctgaccagttggctttcgacaacgggcattattaaagccgctaccgatggcgttagtaagaccctgaataagttaactaaagactacaacgccgccagcgatcgcattgatgcgcaggtcgcgcgctataaagaacaatttacccaactggacgttttaatgacctcgttaaacagcaccagcagctacttaacgcagcagttcgaaaacaacagtaattccaagtaatcaatattcatcgggagacaggtcatgtacgcggcaaaaggcacccaggcctatgcacaaattggcgtcgaaagcgccgtaatgagcgccagccaacagcagttggtcaccatgctatttgatggagtgttaagcgcactggttagagcgcgcctgtttatgcaggacaacaatcagcaaggcaaaggtgtctctttgtcaaaagcgatcaacatcattgagaacggactgcgggtgagtcttgatgaagagagcaaagacgaattaacccaaaacttaattgctctttatagctatatggtcaggcgtttgctgcaagccaatttacgcaacgatgtctccgcagtcgaagaggtggaagcattaatgcgtaatattgccgatgcctggaaagagtctttactctccccttctttgattcaggacccagtctgatgaacaatgcaccgcatttgtatttcgcctggcaacaactcgtcgaaaaaagccagctcatgttacgcctggcaacggaagaacaatgggacgaactcatcgccagcgaaatggcgtatgtgaatgcggtgcaggagatcgcacacctgactgaagaggttgccccgtccactacgatgcaggagcagctccgcccgatgctgcacctgattctcgacaacgaaagcaaggtaaagcagttattacagattcggatggatgaactggcgaaactggtcggtcagtcatcggtgcaaaaatcggtgttaagtgcctatggcgatcagggcggctttgtgctggctccgcaggataacctcttttgaatcttaatgagccgatggctcgcgaataatccgattacggctacgcttctaatattccccttgaatggagtcgaagaatgcgtaatcccacgctgttacaatgttttcactggtattacccggaaggcggtaagctctggcctgaactggccgagcgcgcagacggttttaatgatattggtatcaatatggtctggttgccgcccgcctataaaggcgcatcgggcgggtattcggtcggctacgactcctatgatttatttgatttaggtgagtttgatcagaaaggcagcatccctactaaatatggtgataaagcacaactgctggccgccattgacgccctgaaacgtaatgacattgcggtgctgctggacgtggtagtcaaccacaaaatgggcgcggatgaaaaagaagctattcgcgtgcagcgtgtaaatgctgatgaccgtacgcaaattgacgaagaaatcattgagtgtgaaggctggacgcgttacaccttccccgcccgtgccgggcaatactcgcagtttatctgggatttcaaatgttttagcggtatcgaccatatcgaaaatcctgatgaagatggcatatttaaaattgttaacgactacaccggcgaaggctggaacgatcaggttgatgatgaactcggtaatttcgattatctgatgggtgagaatatcgattttcgcaatcatgccgtgacggaagagattaaatactgggcgcgctgggtgatggaacaaacgcaatgcgacggctttcgtcttgatgcggtcaaacatattccggcatggttttataaagagtggatcgaacacgtacaggaagttgcgccaaagccgctgtttattgtagctgaatactggtcgcatgaagtcgataaactgcaaacgtatattgatcaggtggaaggcaaaaccatgctgtttgatgcgccgctgcagatgaaattccatgaagcatcgcgcatgggtcgcgactacgacatgacgcagatcttcactgggacgctggtggaagccgatccttttcacgccgtaaccctcgttgccaaccacgacacccaaccgttgcaagccctcgaagcaccggtcgaaccgtggtttaaaccgctggcgtatgccttaattttgttgcgggaaaatggcgttccttcggtgttctatccggacctctacggtgcacattacgaagatgtcggtggtgacgggcaaacctatccgatagatatgccaataatcgaacagcttgatgagttaattctcgcccgtcagcgtttcgcccacggtgtacagacgttatttttcgaccatccgaactgcattgcctttagccgcagtggcaccgacgaatatcccggctgcgtggtggtcatgtcgaacggagatgatggcgaaaaaaccattcatctgggagagaattacggcaataaaacctggcgtgattttctggggaaccggcaagagagcgtagtgacagacgaaaacggcgaagcgaccttcttttgcaacggcggcagcgttagcgtgtgggttatcgaagaggtgatttaaatccatccccggcggcaagccggggagatttcattacggcagtggcgtcggtaacggcgctttatccagcgcggcggcacactctgccgtcgggcgatccacacgctccatcgtcataccatcgtactcaatggtgttaccgtcacgctcaacctcgtacagctcacgttttacggtaacgttagtgagatcatcagacatcaatgtcaacttacccggcacggcaatcacccgctgccactgacggcaatccagggtatcgccctctttagtgacaatgaggctgcctatcgcttccggactgaccagcgcacgttgcggccctttggtctgccagtaacccgtcagccagtccggcgcgggggttttcacgacattgttatagttttcgacttcggcacagcccgccagcaacatgagcgcacctgcaattgcgagttttttcatcattcgtcctgcatgagaagaaaagaggattgtggcattaaagccctgatgtcgccagcctttccaggctcagagagaaatttgatctaaccattatttttgtgaattattaccccgaaaataaatttgcatggtgtatgattcgcgactcttgtgtcaaaccttctgagttcagaggctacattcatgtcatggcagcaattcaaacacgcctggttgattaaattctgggcacccatccctgcggtcatcgcggcgggtattctctccacttactattttggcatcactggcacattttgggcagtcacgggtgaatttacccgttggggcggtcagctcctgcagttgttcggcgtccatgctgaagagtggggttattttaaaattatccatctggaaggatcgccattaacccgcatcgacggaatgatgatcctcggtatgtttggcggctgttttgccgcagcgctgtgggccaacaatgtcaaactgcgcatgccgcgcagccgtatccgcattatgcaggccatcattggcggtattatcgccggttttggcgcacgtctggcaatgggctgtaacctggcggcgttctttaccggaattccacagttctcgctgcacgcctggttctttgccatcgccactgccattggttcatggtttggcgcgcgctttaccctgctgcccatcttccgtattcccgtgaaaatgcagaaagtttctgccgcctcaccgctgacgcaaaaaccggatcaggcgcggcgtcgttttcgtctcgggatgctggtctttttcggcatgctgggctgggcgctgctcacggcgatgaaccaacccaaactggggctggcaatgctgtttggcgtcggctttggtttactgattgaacgtgcgcaaatctgctttacttcggcgttccgcgatatgtggatcaccggacgtacccatatggcgaaagcaatcattatcggtatggcggtaagtgccatcgggatcttcagttacgtacagttaggcgttgaacccaaaatcatgtgggcgggaccaaacgcggtaattggtggtttactgtttggttttggcatcgtgctggcaggcggctgcgaaaccggctggatgtaccgcgcggtagaaggccaggtgcactactggtgggtcggtctgggcaacgtgatcggctcaacgattctggcgtattactgggatgatttcgctccggcgctggccaccgactgggacaaaatcaacctgctgaaaacctttggtccgatgggtggcctgctggtgacatatttgctgttgtttgcagctctaatgttgattatcggctgggaaaaacgcttcttccgccgtgcggcaccgcagattgctaaggagatcgcatgaaaaatatcgttcctgattaccgtcttgatatggtgggtgaaccctgcccttatccggctgtcgcaacccttgaggcgatgccgcagttaaaaaaaggggagatcctggaagtggtgagcgactgtccgcagtcgatcaataatattccactggatgcgcgtaatcacggctatacggtgctggatattcagcaagacgggccgaccattcgttatttaattcagaagtaatccctcattcccgctgtggcccacagcgggaacatcgttacctctctatcacatagattttacccgccccctctcctattcttttcagtgtgctctcaggaggtttctatgtgtggacgctttgcccaatcccaaacgcgtgaagattacctcgcgtttctcgcggaagatattgaacgcgatattccctacgatcccgaacctattggcagatacaacgtcgcgccgggaaccaaagtccttctgctcagtgaacgtgatgaacaccttcatctggatccggttttctggggatatgctcccggatggtgggataaaccgccgctgattaacgcccgcgtagaaactgccgcaaccagtcgcatgtttaaaccgctctggcaacatggtcgggtaatatgctttgccgatggctggtttgagtggaaaaaagaaggcgacaaaaaacagccttattttatctatcgcgctgatggacaacctgtttttatagccgcgataggtagcacaccgtttgagcgcggtgacgaagccgaaggagttttaattgtcactgcagcagcagaccagggcctggtagatattcatgaccgccgcccgctggtactgtcgccagaaactgcgcgggaatggatgcggcaagacattggtggtaaagaagcctcagaaatcgctaccagaagctgtgtgccagcaaaccagttcatctggcaccctgtgtcgcgcgcggtgggtaatgttaaaaaccagggcgcggagttaattcaacctgtttgataagcctggagattatctacacctggatggacatcattgtactatgccccgtacatgccccatcacatcctcaacatcaaagtattagagccttgcaaaccattatgcgtctcagtttgtctcatctatcttacgcaaaaaaaatagaactaatatcaagcggcgctatattgcgtattaaataaaaccacctcaattacattaataaatctaaacaaatatcatgcaaataatttccatggttatttttaggctatttaaattaaaaaaataaattatgagtcaaacataaataacaacctttaatataatttgactaccaaatttatattcgttcacaaaatagtcatgcattgtgtgcaatagaaacagttcagataaaaatagggatctacttcacaatttaaatgagaaactaaaacttacatcttgaaataatctcattgattagatgaatatttgtagtgcagtgacatcatttttaaataatagttcaaataaaagggctcacgatgaaaaaattaacagtggcaatttctgctgtagctgcatcagtactgatggcgatgtctgctcaggcagcagagatttacaataaagacagtaacaagctggatctntacggnaaagttaatgcnaagcactacttctcntctaangatgcagatgatggnganacnacttatgnncgtctnggcttcaaaggngaaacncaaatcaacgatcaactgactggtttcggtcagtgggaatatgaattcaaaggcaaccgtgctgaatctcaaggttcttccaaaganaaaacccgtcttgcnttngcnggcctgaaattnggtgantacggctcnatcgattanggccgtaactacggtgtagcatacganatcggtgcntggacngacgttctgccagaattcggtggngatacctggacccaaacagatgtgttcatgactggtcgcacnacnggtgttgcaacntatcgtaacaacgacttctttggtctggtngatggnctgaactttgctgctcagtatcagggtaaaaatgaccgcactgacgtaactgaagcnaanggtgatggtttcggtttctccactacttatgagtatgaaggattcggngtnggtgcaacctatgctaaatcngancgcactnangntcaggtnnnctanggtaanancannntnaatgcntcnggnnaaaatgcngaagtatgggcngcnggnctgaaatatgatgcgaacaanatctatctggctaccacntattctgaaacncagaanatgacngtttttggtaataaccatattgcnaacaaagcacaaaacttngaagnagtngcacaatatcagttngacttcggtctgcgtccntcngttgcttacctncantcnaaaggnaaagacntnggtgnnnnnggtgancnngacntngtnnantatntngatgtnggtgcnacntantacttnaanaaaaanatgtccacttttgttgattacaaaatcaacntnattgannanagnnanttnacnaaancanctggnnttgntaccganganatcgtngctgtaggnntggtttancagttctaatctgattacnnaaagatatgttgngggaggctttgcctccncaacatataagtggnnccctcaagccacttncnttagaagcactancttgcttctnactatataaaccttctgttatatattaccctttattttctggggcgtttcnacgccccatttttaataatactcagtgaacaattancntatcaattaganttaataacaacgatatccntacctaaccggatatctaatgtcataagcatccctttaattatcccctcaacctcttgtaactttcccactcttgaactccacatagtccaaacgccggatgcaaaaaaatcacacgtgcatttctgaaattgtgatgaaggaagatagtatcaattatatgtgcttataaacgaccccgattagcgcagaagtcaccggattgttcaggctccaataggttgagtatgccgtatttattttccaaaataaaaatcgatgctgttgctccttcataaaatacttttactctctggacgcttttcttagctctcttggtgttatcttaaaacgattatggaacctttcagtaaaacgagaaggacacttgtaaccattttccctggcaatctcgctgatgggttttactgtcgtttgtatagcagacaacgcattatttaacctcacgtcgtccaatatactttgaaaacttattccctcgcttgccagacggcgatgcaatgtggaaacagaaatgtagagatatctcgctaccttgtttgctgtccattttgttccaggttcggatagcattaggttataacaacgacttattaatgattgtttactatctgataaaagtaaacaattaacatgatgtgctcctaatgaaagtagaacgcccattgctaagtgttcctgaatttgcgttgagaagcctcggaaaatagatgtttttagttgctcccaacaatatattaactcggggttctgaggtaagcagaaacctgtcgtgttacgaatttgatcagttatcgcataaaatttttgaaacttttcaattagatcaatgggataataaagcatttctgcaagataaagacctgcttctggataattcgcaatataaaattcatatccacagggaaataatattatctgattattatcaacagttagactatgcgtctcccaattgataactttttttccctgacggatacgacataaagctggcataagaggcttaaccctgtgaatctcatgatgtttatgcatccgtatttcttcaatctttaggttagacttatcttttgccagcatactcttaccctactttatctcataaactggtgttatctcagcggttgcaattttattggcattaagcatataaccaactaacgctccgctggaattagaatccacaggaatcttatcagtttttagagcccatactttaaactggtaatgatggggtttatctcctttgggaggacatgctccaccaaatcctgcataaccaaaatcatttcggccttgaacagcaccagtcggaagttttgtaccatcacgtcttcctgcatcagtgggcaaatatgttacagttgctggaatattagcaacagtccagtgccaccatccactgcctgtaggagcatctggatcatacacagttacggcaaagcttttggtgccttcaggagcaccagaccaggttaatgagggcgatgtattacccccttcacacccaaatccagaaaatacatgagacgttgtaagttgctctcctgtttttatttcattactagtgacctgaaatgctgcggcctgcgcagaaaatgttatgaatgccaatacacttgaaacgataagttttttcataaaaacctcattgttgtgacctatcgttattttatttgatgtgccttgatctcattatgcataaaggcgcaatgatcgcgcaaatgcaatcataattataaaggtgccccgaacattagccataatatgcacaaatcagattcctgttatctcaaggataattattttttaatgcggtgcacttcgtgacaacaagttaatgactaacacaccggcacaaatcaacatcatgcctatgatagctggcaggtccagtcgttgaccaaaaaatccccaggaaagcaaactaatcagaacgataccgactcctgaccagatagcataagcaatccctgtaggtatataagccagcgtctgagctaataaccagaatgatgcacaatagcaaataattgtgccaacagagggccataaccgtgtaaacccctctgaaaacttcattaaggttgtaccaatgacctctgcaagtattgcgccaccaagataaatataagggttcatagcatattctttcctgttcatactggagagaattgtactacagtttgaacacaactcaccgttttcatcctggtgtatgtgtatccagggggctctggcgtggcaagagataaaggcaggaacaataatgatcagaaggaaccccaggctaacgaatgagttcactcttcctgggagcaaagcgaagacaaaacatgttatcgcgtttacggatcgtggatggcagaaaacaaccaggatcaggtatccattttaaaccagaaattgagtgagtttgccccatccatgccccacgctgtgggatcggatataattaaacaagcatagtcaacaggttacacaacctacacctgcatggacatcacttcctgatacgccgccaccagcttattacgcacctgaatccccatttgcatagaaactgaggctttttgcatatcggtcatcacatcgtttagcgccacgccgggttcaccgagggtgaatttttctgcctgcgtgcgggcgactgtttgtgtatcgcttatgcgatcgagcgcggcgtgcagctgcccggcaaaactaatggtcggttgcggcagtgattcctgcgcacgcgcactcatcgccgtagcctgtaactggctgataaccccttcaatcccctgtatcgctgacattttcgtctcccggataatttctggtaacaaagcctaccagtaagtcaataagacaaaggcgctaaatagcaacaaaaaaacgggtttattggcggatagaaaaaaacgaaagcacaaataatgggagcgtcaatttttcgagtttgctgacccgggagtgagtcttgttccactttgccaataacgccgtccataatcagccacgaggtgcgcgatgaatgcgactgcagcccagacaaaatctcttgagtggcttaatcgcctgcgtgcgaatccgaaaattccattgattgttgccggttccgcagcagtggcggtcatggtcgcactgatcctgtgggcgaaagcccccgactaccgcacattattcagcaatctttccgatcaggatggtggcgcaattgtcagccaactgacgcaaatgaatattccttaccgcttcagcgaagccagcggcgctattgaagttccggcagataaagttcacgaactgcgcctgcgcctggcgcaacaaggtttgccaaaaggcggcgcggtcggtttcgaactgctcgatcaggaaaagtttggtatcagccagttcagcgaacaggtgaattatcagcgggcgctggaaggcgagctttctcgtaccatcgaaactatcggcccggtaaaaggggcgcgcgtacatctggcaatgccgaaaccgtctttattcgtccgtgaacaaaaatccccttctgcatcggtgacggtaaatctgttacccggccgcgcactcgatgaagggcaaattagcgccattgtacatctggtttccagcgcggtggctggtctgccgccgggaaacgtcacgctggtggatcagggcggacatctgttaacccagtccaacaccagcgggcgcgatcttaatgacgctcagttgaaatatgccagcgatgtcgaaggccgtattcagcggcgtattgaagcgatcctgtcgcctattgttggtaacggtaatattcacgcccaggtcacggcgcaactggacttcgccagtaaagaacaaacggaagaacagtatcgccctaacggtgatgaatctcacgcggcgcttcgttcacgccagcttaatgagagcgagcaaagcggttccggttatccgggcggcgtaccgggggcgttgtcgaatcaaccggcacctgcgaataacgcgccaatcagcacgcctccggcaaatcaaaataaccgccagcagcaggcgagcaccaccagcaatagtgggccgcgtagcacacagcggaatgaaaccagtaactacgaagtcgatcgcaccattcgtcataccaaaatgaacgtgggcgatgtgcaacgtctgtcagtcgcggtagtggtgaattacaaaaccttgccagacggtaaaccattgcctctcagcaacgaacagatgaagcaaattgaagctctgacccgcgaggcgatgggcttttctgaaaaacgcggtgattcgctcaatgttgttaactcgccgttcaatagcagtgacgaaagcggcggagcactgccgttctggcaacagcaagcgtttatcgatcagttgctggctgctggctgccggttgctggtactgctggtggcgtggttgctgtggcggaaagcggtacgcccgcagctaacacgtcgcgccgaggcggtgaagactgtgcagcaacaggcacaggcccgcgaggaagtggaagatgcggtggaagtccgtctgagcaaagacgaacaactccaacaacggcgcgctaaccaacgactgggggcagaagtcatgagccagcgtatccgtgaaatgtctgataacgatccgcgcgtggtggcgctggtcattcgccagtggataaataacgatcatgagtaacctgacaggcaccgataaaagcgtcatcctgctgatgaccattggcgaagaccgggcggcagaggtgttcaagcacctctcccagcgcgaagtgcaaaccctgagcgctgcaatggcgaacgtcacgcagatctccaacaagcagctaaccgatgtgctggcggagtttgagcaagaagctgaacagtttgccgcactgaatatcaacgccaacgattatctgcgttcggtattggtcaaagctctgggtgaagaacgtgccgccagcctgctggaagatattctcgaaacccgcgataccgccagcggtattgaaacgctcaactttatggagccgcagagcgccgccgatctgattcgcgatgagcatccgcaaattatcgccaccattctggtgcatctgaagcgcgcccaggccgccgatattctggcgttgttcgatgaacgtctgcgccacgacgtgatgttgcgtatcgccacctttggcggcgtgcagccagccgcgctggcggaactgaccgaagtactgaatggcttgctcgacggtcagaatctcaagcgcagcaaaatgggcggcgtgagaacggcagccgaaattatcaacctgatgaaaacgcagcaggaagaagccgttattaccgccgtgcgtgaattcgacggcgagctggcgcagaaaatcatcgacgagatgttcctgttcgagaatctggtggatgtcgatgatcgcagcattcagcgtctgttgcaggaagtggattccgaatcgctgttgatcgcgctgaaaggggccgagcagccactgcgcgagaaattcctgcgcaatatgtcgcagcgtgccgccgatattctgcgcgacgatctcgccaaccgtggtccggtgcgtctgtcgcaggtcgaaaacgaacagaaagcgattctgctgattgtgcgccgtcttgccgaaactggcgagatggtgattggcagcggcgaggatacctatgtctgataatctgccgtggaaaacctggacgccagacgatctcgcgccaccaccggcagagtttgtgccaatggccgagtcggaagaaaccattattgaagaggtcgaacccagccttgagcagcaactggcgcaactgcaaatgcaggcccacgagcagggttatcaggcggggattgccgaaggtcgccagcaaggtcacgaacagggctatcaggaaggactggcccaggggctggagcaaggtctggcagaggcgaaggctcaacaagcgccaattcatgcccggatgcagcaactggtcagcgaatttcaaactacccttgatgcgcttgatagtgtgatagcttcgcgcctgatgcagatggcgctggaggcagcacgtcaggtcataggtcagacgccaacggtggataactcggcactgatcaaacagatccaacagttgttgcagcaagaaccgttattcagcgggaaaccacagctgcgcgtacacccggatgatctgcaacgtgtggatgatatgctcggcgcaactttaagtttgcatggctggcgcttgcggggcgatcccaccctccatcctggcggctgtaaagtctccgccgatgaaggcgatctcgacgccagtgtcgccacccgctggcaagaactctgccgtctggcagcaccaggagtggtgtaatgaccacgcgcctgactcgctggctaaccacgctggataactttgaagccaaaatggcgcagttgcctgcggtacgtcgctacgggcgattaacccgcgctaccgggctggtgctggaagccaccggattacaattgccgctcggcgcaacctgtgtcattgagcgccagaacggcagcgaaacgcacgaagtagaaagcgaagtcgttggctttaacggtcaacggctgtttttaatgccgctggaggaagtggaaggtgtcctgcccggcgcgcgtgtatatgccaaaaacatttcggcagaagggctgcaaagcggcaagcagttgccgctcggtccggcgttattaggtcgtgttctggacggtagcggtaaaccgctcgatggcctgcccttccccgatacgacggaaaccggtgcgctgattaccccgccatttaacccgttgcaacgtacaccgattgaacatgtgctggacaccggcgtgcgcccaatcaatgccctgcttaccgtcggacgcgggcagcgtatggggctgtttgccgggtccggcgttgggaaaagtgtgctgctggggatgatggcccgttacacccgcgccgatgtcattgtcgtgggtttgattggtgaacgagggcgcgaagtaaaagattttattgagaatatcctcggtgccgaaggacgtgcacgctccgtggtgattgccgctccggcggatgtttctccgctcctgcgaatgcagggtgccgcctatgccacgcgcattgccgaagattttcgcgatcgtggtcagcatgtgttgctgattatggactccctcacccgctacgcgatggcccagcgtgaaattgcgctggcgattggcgaaccacctgccactaaaggttatccaccgtcggtgtttgccaaattaccggcactggtcgagcgtgccggaaatggcattagcggcggcggctcgattaccgcgttttataccgtgctcaccgaaggcgatgaccagcaggaccccattgctgactccgcgcgggcaatcctcgacggtcacattgtgctgtctcgccgactggcggaagccgggcactatccggctatcgatattgaagcgtcgatcagtcgcgcaatgacggcgttgatcagtgagcaacattacgcgcgagtgcgcaccttcaaacagctgttgtcgagttttcagcgtaaccgcgatctggttagcgtcggcgcgtatgccaaaggcagcgatccgatgctcgacaaagccatcgccctgtggccgcagctggagggctatttgcaacaaggcatttttgaacgcgcggactgggaagcgtctctccaggggctggagcgtattttcccgacagtgtcataacccaggagataacggcagatggcggaacatggtgcgctggcgaccctgaaagatctggcagaaaaagaggtagaggatgccgctcgcctgctgggtgaaatgcgtcgcggatgtcagcaggcggaagaacagctcaaaatgctgatcgattatcagaatgaatatcgcaataacctcaatagcgatatgagtgccgggatgaccagcaaccgctggatcaactatcagcagtttatccagacgctggaaaaagccattactcagcatcgccagcaacttaatcagtggacgcagaaagttgacattgccctgaacagctggcgagaaaagaaacaacgtttgcaggcctggcagacactgcaggaacggcaatccacggcggcactgcttgcagaaaaccgcctcgatcagaaaaagatggatgagttcgcccagcgcgccgccatgaggaaacctgaatgattcgcttagcgcccttgattaccgccgacgttgacaccaccacattgcctggcggcaaagccagcgatgctgcacaagattttctcgcgttgttgagcgaagcattagcaggcgagacaacaaccgacaaagcggccccccagttgctggtggcaacagataagcccacggcaaaaggcgagccgctggtcagcgatattctttcagacgcgcaacaagcagatttactgatccctgtggatgaaacaccgcctgtcatcaacgacgaacaatccacattaacaccgttaaccaccgctcagacgatgacgttggctgcggtggctgacaaaaatacgacaaaagacgaaaaagcggatgaccttaatgaagacgtcaccgcaagtctgagcgccctttttgcgatgttgccgggttttgacaatacgcccaaagtgactgatgcaccgtcaaccgtgttaccggcagagaaaccaacgctcttcacaaaactgacttctgcgcaactcactacagcacagcctgatgacgcccccggcacaccagctcagccattaacaccgctggtagcagaagcccagagtaaagcggaagtcatcagcacgccttcgccggtgaccgctgacgccagcccgctaatcactccacaccagacacagccactgcccaccgtcgccgcgcctgttttgagtgcaccgctgggttctcacgaatggcaacaatcattaagccagcatatttcgctgttcacccgccaggggcaacaaagtgcagagttgcgtctgcacccacaggatttaggtgaagtgcaaatttccctcaaagtggatgataaccaggcgcagatccagatgatttcaccgcatcagcacgtacgcgccgccctggaagcagcgctgccggtactgcgtacgcagctggccgaaagtggcattcagttagggcaaagcaacatcagtggcgaaagctttagtggtcagcagcaggccgcttcccagcaacagcaaagccaacgcacagcaaaccatgaacctctggcgggggaagacgacgatacgcttccggttcccgtctctttacaagggcgtgtaacaggtaacagcggcgttgatattttcgcctaacgtcagaggtagcaccgtaatccgcgtcttttccccgctttgttgcgctcaagacgcaggataattagccgataagcagtagcgacacaggaagaccgcaacacatgactgattacgcgataagcaagaaaagcaagcgatcgctttggatcccgattctggtattcattaccctcgcggcctgtgccagcgcaggttacagctactggcattcgcatcaggttgccgctgacgacaaagcgcagcaacgcgtcgtgccctccccggtcttctatgctctggatacctttacggtcaatttgggcgatgcggatcgcgtgctttatatcggcataaccctgcgactgaaagatgaagcaacccgctcgcggctgagtgagtatttgccggaagtccgtagtcgcttgctgttactgttttcgcgtcaggatgctgccgtactggcgacagaagaaggcaagaaaaacctgattgccgagattaaaaccacactttccaccccgcttgttgccgggcaaccgaaacaggatgtcaccgacgtgctgtataccgcttttattctgcgataacgacatgggcgatagtattctttctcaagctgaaattgatgcgctgttgaatggcgacagcgaagtcaaagacgaaccgacagccagtgttagcggcgaaagtgacattcgtccgtacgatccgaatacccaacgacgggttgtgcgcgaacgtttgcaggcgctggaaatcattaatgagcgctttgcccgccattttcgtatggggctgttcaacctgctgcgccgtagcccggacattaccgtcggggccatccgcattcagccgtaccatgaatttgcccgcaacctgccggtgccgaccaatctgaaccttatccacctgaaaccgctgcgcggcacagggctggtggtgttctcgccgagcctggtgtttatcgccgtggataacctgtttggcggcgatggacgcttcccgaccaaagtggaaggtcgcgagtttacccataccgaacagcgcgtcatcaaccgcatgttgaaactggcgcttgaaggctatagcgacgcatggaaggcgattaatccgctggaagttgagtacgtgcgttcggaaatgcaggtgaaatttaccaatatcaccacctcgccgaacgacattgtggttaacacgccgttccatgtggagattggcaacctgaccggcgaatttaatatctgcctgccattcagcatgatcgagccgctacgggaattgttggttaacccgccgctggaaaactcgcgtaatgaagatcagaactggcgcgataacctggtgcgccaggtgcagcattcacagctggaactggtggccaactttgccgatatctcgctacgcctgtcgcagattttaaaactgaaacccggcgacgtcctgccgatagaaaaacccgatcgcatcatcgcccatgttgacggcgtcccggttctgaccagtcagtacggcactctcaacggtcagtatgcgttacggatagaacatttgattaacccgattttaaattctctgaacgaggaacagcccaaatgagtgacatgaataatccggccgatgacaacaacggcgcaatggacgatctgtgggctgaagcgttgagcgagcaaaaatcaaccagcggaaaaagcgctaccgatgcggtgttccagcaatttggcggtggtgatgtcagcggaacgttgcaggatatcgacctgattatggatattccggtcaagctgaccgtcgagctgggccgtacgcggatgaccatcaaagagctgttgcgtctgacgcaagggtccgtcgtggcgctggacggtctggcgggcgaaccgctggatattctgatcaacggttatttaatcgcccagggcgaagtggtggttgttgccgataaatatggcgtgcggatcaccgatatcattaccccgtccgagcggatgcgccgcctgagccgttagtgatgaataaccatgctactgtgcaatcttccgcgccggtttctgctgagccactgctgcaggtgagcggcgcactcatcgccattattgccctgatcctcgctgctgcctggctggtaaaacggctgggatttgcccctaaacgcactggcgttaacggtctgaaaattagcgccagtgcttcgctgggcgcgcgtgaacgggtcgtggtggtcgatgtggaagatgcacggctggtgctcggcgttaccgcagggcaaatcaatctgctgcataaacttcccccttcagcaccaacggaagagataccgcagaccgattttcagtcggtcatgaaaaatttgcttaagcgtggcgggagatcctgatgcgtcgtttgttttctgtcgcaccggtccttctctggctgattacgcccctcgccttcgcgcaactgccgggtatcaccagccagccgctacctggcggtggacaaagctggtcgctcccggtgcagacgctggtgttcatcacctcgttgacgttcattccagcgattttactgatgatgaccagtttcacccgcatcattattgtttttggtttattgcgtaacgcgctgggaacgccctccgcgccacctaaccaggtattgctggggctggcactgtttttgaccttttttattatgtcgccagtgatcgacaaaatttatgtcgatgcgtaccagccattcagcgaagagaaaatctcaatgcaggaggcgctggaaaaaggggcgcagccgctgcgtgagtttatgctgcgtcagacccgcgaggcagatttagggttgtttgccagactggcgaataccggcccgttgcaggggcctgaagctgtgccgatgcgcattttgctcccggcctacgtgaccagcgagttgaaaaccgcatttcagataggcttcacgattttcatcccttttttgattatcgacctggtgattgccagcgtgttgatggcattggggatgatgatggttccccccgccaccattgctctgccctttaaactgatgctgtttgtactggtggatggctggcaattgctggtcggttcgctggcgcagagcttttacagctagagaggcaaaatgacacctgaatcggtcatgatgatgggaactgaagcgatgaaagtcgcgctggcactggcagccccgctgttgctggtggcgctggtcacgggccttatcatcagtattttgcaggcagccacgcagattaacgaaatgacgctgtcgtttattccgaaaatcatcgccgtatttatcgccattattattgccggaccgtggatgctcaatctgttgctggattacgtccgcaccttgttcactaacctgccgtatatcatcgggtagcccgtacaatgatgcaggtgacaagcgatcaatggctttcctggttaagcctgtacttctggccgttactgcgcgtgctggcgctcatttctaccgcgccaattctgagcgaacgcagcgtgccgaaacgggtaaaactgggtctggcaatgatgatcacattcgccattgccccatcattacctgccaacgatgttcctgttttttcgttctttgctctgtggctggccgtgcagcagatcctgatcggcattgcgcttggttttaccatgcaatttgcctttgccgctgtgcgaaccgctggcgaaattatcggtctgcaaatggggctgtcatttgcgacatttgtcgatcctggcagccatctcaatatgcccgttttagcgcgcatcatggatatgctggcattactgctgttcctgacatttaacggtcatttatggttgatttcactgctggtcgatacctttcacaccctgccgattggtagcgaaccgttgaacagcaatgcgtttctggcactcaccaaagcagggagtttgattttccttaacgggctgatgctggcgttaccgctcattactctgttgctgaccctgaatctggcattaggtttactgaatcgtatggccccacaattatccatttttgttattggatttccattaactctgactgtcggcatctctttaatggcggcattaatgccgttaattgcgcctttttgcgaacatttattcagtgaaatttttaatttgctggctgatattaatgcgccacggttatataaacgcgttaaggtgtcgtgccacgcctgccactgcaacgagctttgcagaacatacatgttgctgaccatccggcgaatcacataccaggagaggagtaacatgctggtaaagagcgcccacagcagggttaatgcaatgctgatactgccgaaatcgccgcgcacgccttcgcttagcgtatggacgcgcaccagcacaccgtcgaaatggtccagacgttcccagctaacatagcgactgtccatacgaatgccgccccgcgtgtcatgttccattgcctgcgccagcaaggccagttcacgaggatcaaaaatattccctgttggatggtcaggatttgaagaggtcaaaaatctcagcttactgtcatagagctgatactcaccatcgaggtttttatcgatggcgtttcttaaaaattgctgcatagtacgcacgggaatactcatccccagcacgccataccagtagttattactgtctaccggaacactgacggtaacctgcggttcagtattgctggcgtgttccggttgcgaagtgaaccagcgtaccgcgcggtgacgattttctcgttgtgaatggccgataaaccagggttgggtgacatagccgtaataacgcgttggtacattgcgcgtaaacaaggtcggcagcgtcgaaacgtaaaatccagcacgcgagacatacacagcctgttcaaccatcgacgaggagttgtgcgccagtcgcagcaagtaaccaacttccagtgcagcggtaatttcattgtcgaggctttcattttcgcgagacaggagattcccctcgctgactaatgcatccgatacgccattgactggcagggtgcgccgtcggttgagttcgatttgccaggcgtgctcgtcgcgatgctgttcgaactcggttacggcattacgcagagaggtgaaatccagtggcgccacgagagcttcgcgcatgccattacgcaaaaagatcagtttgtcgacgttatactgcaaatgcttatcgagcgcgttggctacgttttccagatgattacgctggctggatatataggcatcttccagcaccaccacttcacgccaggtgagcaaggtggaaaaaagcaataccacgataaagcagagattaacgatatgaccaggccccaggcggcgtgcgagttttttcaaccagctctggttttccatttttgtctcgtgctgcaccctgacgactcccaacctgcttttttatgattctggcataacccggcgatagcgtaccgcaaaacagcgataattttataatggtggcatgataagacgcgactatcattcattgcaggcattgggacaccaggccggatgtgatccggcctggtgttaatgataccctttcaaacttcttccgcagaacgactcccctcccccggaacaagatcggtttcatgaaaagcttcccgcttgaccccgtaaccgtcataccaacgacactcaaccataccgctggagtatccagtgacaatcatccgcgggccgccctctttaaccgtaacttcctcactaaccataaagctcatactcgcctccttttttcgagtgaaacttgttcaccttagttgaagatggcgaattttgcataatagccagtgcgagtattaatgtgcctgaccgcgcattttcgctactgctttcactcccagcaccacgatgccgccgatgataaatccaagaatcagatttaaaacagtcggtaatatcatcgccaccactgcactttgctgcccggcgatatgttcaatagcgtgatgcagcggcgcaataccatgtaccacaatcccgccgccgacgaggaacatcgccagcgtgccgacaatcgataatgctttcatcagccagggcgcgataatcaataaccctttacctaatgcctgcatcagcgcgctggatttttccgccagccaataccccaggtcatcaatcttaacgataacccctaccagaccgtagacgcccacggtcactaccagcgcgatgcctgaaagcaccagcacctgattaagcaacggcgcctctgccacaatccccagcgtgatggcgacgatttccgcagacaaaataaaatcggtacgaatcgcccctttaattttgtccttttcaaacttcagcggatcctgcgccgccagcttctccagacgctgctgactctgcgccggatcttctttatgtttacgcgcctccagcatatgcagcactttctctaccccttcaaagcagagaaacgcgccaccaatcatcaacagtggcgtaatcgcccacgggataaacgcactgatgatcagcgccagcggcaccagaatcactttattgatcagcgatcctttcgccacgccccagaccacgggaagttcccggttggcccgcacgcctgaaacttgttgcgcattgagcgatagatcatcccctaatacaccggcggttttcttcgccgccagtttgcccatcacggagatatcgtccagcagtgtggcgatatcatcgagcaacgtcagtaaactactcccggccaaaagcattccctctcatttttattgttgaagggtgtaagtatgaagcaaaaacggcagctctgatacttgcttcacaggtcaacatttttttaacaatcaagtgcaattatatctctcgccagcagaatgattttcacgtttactatgaaccacctttttatttccaccgtgagggattatgcgtttccgccagttgttaccgctttttggcgcgctgtttgcgttgtatatcatttggggctcaacctattttgtcattcggattggcgtggaaagctggcctccgttaatgatggcgggcgttcgattcctggcagccggtattttattgctggcatttttgctactgcgcggacacaaacttcccccgctacgtccgctgctcaatgccgcgctgattggcctgttattgctggctgtcggtaatggcatggtgacggttgccgaacatcaaaatgttccttccggcatcgccgccgttgtggttgcaaccgtgcccctctttaccctgtgcttcagccgcctgtttggcattaaaacgcgcaaactggaatgggtgggtatcgccattgggcttgccggaatcatcatgctcaatagcggtggaaatttaagcggcaatccgtggggcgcgattctgattttaatcggctcgattagctgggcgtttggctcggtttatggctcgcgcattaccttacctgtagggatgatggcgggtgcgattgagatgctggcggctggcgtggtgttaatgatcgcgtcgatgattgcgggtgaaaaactgacggcgctcccttccctttcaggcttccttgcggtcggctatctggcgctgtttggttcgattatcgccattaacgcttatatgtatttaatccgcaacgtcagtccggctctcgccaccagctacgcctacgttaacccagtggtcgcggtcttgctgggtacgggactgggcggcgaaacgctgtcgaagattgaatggctggcgctcggcgtaattgttttcgcggtggtactggtcacgttgggaaaatatctcttcccggccaaacccgttgtcgcgccagttattcaggatgcatcaagcgagtaaatgaatcccctgcgtgtcgatctgcgcgctggcaccttcgccgcagatccactcttccagacgctcggtaagcgcttcatccgtcagcttctcgcgcccacgtaacgcacactcccagacaatcagtacgcgccagccgagtgcctgcaagcgattgatatcgcggcgatcgcgctcaacatttttacctatcttctccagccagaactcggttcgggtcgcaggcactttaaacagatagcagtgatgatgatgccagaagcagccgtgggtaaatatcacgcagcgatattcatcaacgacaaaatccgggcgtccgggcagactggcgtcctgaacgcgaaacgcaaggccctgcccggttaacaaactggcgaggcgcttctcaatcgccgtatcacgcgtggcaatcgcgcgcatatttttgctgcgggtggccttatcgtgaacgtcgaccatgttgtgcctcttgctgacgcaacgccaccgcctgtttgatttttggctcaagcagttttgccaccgcggcaaagaccggcacgaccaccgagttaccgaactggcgataggcctgagtgtccgaaaccggaatgcggaatttcgcttctcccggcgcttcaaaacccattaagcgcgcgcattcacgaggtgttaaccgacgtggacgatgttgctgattcagcggatcgtcaaagtctttctcacccgtggccatatcccagccgcggtcgattaaaatttccgcgccatctttgtaataacgagcagacagcgtacgggtgacactttgcggattgttcggataaaccattccataaccgaagccgttaccgcgcgcctgatgttttttcgcatatcgatagaggtacttccacagcaccggcgtcaggatatattttgcctcaaccatcgggtccagcagctgcgccagcgtcactcgctgtgcagggaaacattcgctgatatcacgcagagtaaaatcggctttcagattcagatcgcgacgaaaacccaccagcacgatgcgttcacggtgctgcggcaggaaatgtttaccgtcgatgattttcggatcgtccggcccgttatcttctgcgtcggcaacgtcatagcccagttcgtccagcgtctgcatgatgatgcggaacgtttttcccttatcgtgacttttcaggtttttgacgttttcgagcacaaacatcgccggacgacgcgcgtcgataatgcgcaccacatcaaagaacagcgtgccctgggtatcgcaggcaaaaccgtgcgcccgcccgagcgagttctttttcgatacgccagccagcgaaaatggctgacaagggaaaccggccagtaaaacatcgtgttcaggaatgtgttgacgaatatgttccgccgccgcctcatcactcacgccttcttgatgactgagggtgatgtcgcggatatcttcattaaaatgatgcgtcgccgggtcgcaataatggttggctttataagtgcgtaccgcatgtttgttccattcgctggtaaacacgcactgtccaccaatcgattcaaaaccacgacggatgccgccaattccggcaaatagatcgataaagcgaaacgcataatgcggatgatgttccggtggtttgggtaacaacgtttgcagatgggcaaactctttctcacttaaacggtgccatgcagagtcattcgccagcgcacgttttaaaattgccgcgctccagtgattctcacccacaccattaagctgcgccaccagcgttttaacatcataaatttgcagcagtttctccagcattgcctgtgcggcattcccggtgctgtatgaatcggttactgatatattttcctgcatagatttaaccggccatctgagatggccgacaggttaacataattactgccgtttagggccacgcgctcagccagcgggtgaaaacgcatctatcaccttgtgatcgataccttaattctcccccgccagttcggcaccgagcttcgccataaactcgactaaaaattgcgcgttgtgctgtgccagctgcttgcctcttgcggtttgcatggtttgcggtaatttcagtaactttgtctggaaatgatccagcgcgtagcgtttatcatcaagcgggcgatgctgtgcgaacggatcttcgccatcaaacagcgccaagcccaatgcccctgaaacggcaaataagcgcgccaggccaatcgcccccagggcttccagccgatccgcatcctggacgattttagcttccgttgttaagggggcgatttgcgcgctgaaactgtgagcggcaatggcatgacaaacggcctcaattttctccgccggaaattgcacgaactcttcacggagcaggcgacgcgtctcttctgccgccaggattgaagaacgctgccgttgcggatgatttttcgccaagctcacgatatcgtgaaaataacaggcggttaaaatcaccagcatatcgacatcgtcatctgccgccagtttctgtgccgtagcccagacacggcgaaaatgacacaggtcatgcgccgcgtcctgatgttgatgatggtttttcaaccagttctcgaactgtgcctgccagtgttgtaactccatacgcgctccgttgccaaagagtcgcaaccttagcagtttttattcatagcgtctgcaacgtgcgggacgaggtcgggtgtaccatgcaatgccgcctaacaaggcaccaaccagggccataaacagaaatccgaccaatgctcctaaccacttccccgcggtagatcctaaatcactttcaaatcccgacacgggggcatcggggatccggctcatcacccagatgtatcgcgccattgcccagacgaaatagccacaccatgtatagaaagcccacaaagccaatttgccgccagggctgcgagagagtctctcttccatctttgtcgaaccgtattccattttgagataacccggaaaattcagacttagaactattatgtgataaaaatcacatttttccacattggatgagccagtcaagactcaatcattttttgaacaaatagataaattttgcgcaacggcggtgaatacaggaaaattcgatttgaacgattttatttatctttgatttcggctttattaattcattcaatcaatatattggtactgattacaattatacctttttatttttctgtgtcatcatgcctccgttattagccttttatcgtcttgtttatattttttttggccggcatgatgccggctttttttatgccttcattaatgtgcgcgagatcacgccagccgtttagcgcaacaatcattgatactccctatcttttcaatcaactcataacatattgatatacatccataatattcatgaatatttatattcagaattcataactatgaattatattaaatagattagaaacattttgaaatcttttaaatacatttgttacatgtaatctttaaaataaaatgaacttcatagaatagtatccaaatgtgctttttttggataacagcacttattgatatattcatgaagattataatcacaagggaatacataatgaaaagaaaagttctggcaatgctggtcccggcgttattagttgctggcgcagcaaatgcggctgaaatttataataaaaatggcaataaagttgagctatacggcaagatggttggtgagcgcattctgaccgaccgtgaaaatggtgaaaaaggcgataattctcaagatacctcttatgcccgtgtaggcgtgaaaggtgaaactcagatcaaccctgaactgactggttacggtcagtttgaactagacctggaagcatcaaacagacacaaccctgaccaaactcgtttggcatatgctggtttgagttacaaagattttggttcattcgactacggtcgtaatgtcggtgtcgcgtatgatgcagaagcatttactgatatgtttgttgagtggggcggtgactcatgggctggtactgacctgttcatgaccaaccgtaccaacggtgttgcaacctatcgtaacacagatttctttggcatggttgaaggtctaaattttgctctgcaatatcagggtaaaaatgaaggtacaggcaactacaaagcaaatggcgatggccatggtttatctgcaacttacactattgacggtttctcatttgctggtgcttatgcaaactctgaccgtactgattggcagtctggtgatggtaaaggcgaaagagccgaagtttgggcgttgtcaacaaaatatgacgctaacaatgtctatgctgctgtgatgtacggtgaatctcacaacatgaattccgacgacggtgatgttgtgaacaaaacacaaaacttcgaagctgttctgcaatatcagttcgactttggtctgcgtccatccatcggttactcctattctaaagcactggacgtagcaggttacaaagattctgatcgtctgaactatattgaaatcggtacctggtattacttcaataagaatatgaacgtatataccgcttatcagatcaacctgcttgataagagtgattatgttctcgctcatggactgaacaccgacgaccaactggcagttggtatcgtctaccagttctaatcagccaacgcgccgaggcgtgttactgtaaaacataacaccagcctgagttcgtccctcatcgaactcaggctttttttattggcatttcatctccatctgcggcacacgcaattgccaaagcatctcgatacagccccttaccctgcccctcctggcacaatatcctctaccagcaactcttccagccaacaccccaaatgcatttctttataaatttaatctgtaacaaaaccgcttcccatatagaaatatttgcaaaaatagtgcatgaaaaaagctttttccctaccaatccgggatataaatattcatcagtaccacaacattccacagcactaaatctctccccatcgcccccaaacctctgataatggtctaaaatcattgagaccacttgcgacgacgttactcaataaggaaagtttggcgtgaataatattcaacaccagtgcagcatcatcattacatacttatgcccgccaactaccgctttcgatatattgactcaatttttcagcctggttaaaaatagcgaccagctcagtcgcaaatatagtgactaccctaactaagcaacaataaggaatacactatgactgttcaaacaagtaaaaacccgcaggtcgatattgctgaagataatgcgttcttcccttcagaatattcgcttagccaatatacgagtcccgtctctgatcttgatggcgtggactatccaaaaccgtatcgcggtaaacataaaattctggtgatcgccgcggacgaacgttatttgccgaccgataacggaaaactgttctcgaccggtaaccatccgattgaaacgttgctgccgttgtatcatctccatgctgcaggtttcgaattcgaagtggcgaccatttccggtctgatgaccaagtttgaatactgggctatgccgcacaaagatgaaaaagtaatgccattctttgaacagcataaatcgttattccgtaatccgaagaaactcgcggatgttgtcgccagcctcaacgctgatagcgaatatgcagcaatctttgttcctggtgggcatggcgcacttattggtttaccagaaagccaggacgtggctgccgctttacagtgggcaatcaaaaatgaccgttttgttatctccctttgccacggtccggcggcttttctggcacttcgccacagcgataacccactgaatggttattctatttgcgcattcccagacgccgcagacaaacaaacgccagatattggctatatgccgggtcatctcacctggtacttcggcgaagagttgaagaaaatgggcatgaacatcattaatgacgacatcaccgggcgagtacataaggaccgtaaacttctcaccggcgacagtccttttgcagcgaatgcgttgggtaaactggcggcgcaggaaatgctggcagcttacgcgagttaatccctgttacattgtgatgtaagcgcataatcaatcgcagccacgttaatactcacgacgtggctgcgttttttcacggttaacttatggcgtactgaagcccgatgttaatttctttgcggtaacgtaattcggaacacgttatgcttactgagatagtgatacgtagcacttcctccatgtaattcggcaatcgctttgactaaagaaaggccaagtccctgacctacggaatgacgcgaattatctccccgccaaaatctacggaagagtttttcaggctcattaattttcgttccaggactggcgatatcaatattaagagaaccgttggcatcaagaaaactggttatatgaatacgcgatttttctggtgaatatcgaatggcgttaacaataagattcgataacattcgttgcagtaaaattttatccgcaaagatttgttgattgcactcgaccttaaaacgaatctctttctcgtctgaaagatattcaagatagtccaaaagattttcaacttccttattgagagaaagcgcatccagtttcaccaaaacattgtttttgtctgccctggcaagaaacagtatattctctgttaaccgcgaaatattttccagctcttcaatgtttccggcaattgttttttgatattcagcgatacttctgatttgactgagcgtaacctgattctgacccagtaatgcattaattggcgttctaagttcatgagcgagatcgtcagcaaattgactaaggcgctcaaaatctttgactaaagcatgatgcattttattcaacgcctgcccaagaggttttagttctctcggtaatgcgctaacctcaaccggcactcggctatcgttataattcagcgcttccgttacgccactcaactttttgatctctcgcaaccccgtcctgattaacaacggacttaatactgagcacaatataatggcgacaatgcaaattataatgctattaattttatactgttcaagcatattatgtctggctgaagccaatttagccacagtaaccgttaatgatggcgaaacttcatcaatgttaattcgtaaagcatctatctctgtatcattaataatgcttctgtaaatgcctgctgcgctgattgtctcactagcaggtatgttatttaacatgtcatcactgacatttgtccggttaacaattttattgatgccatcaccatgaatgatcaaaatatcctgactaacatccatcatccggttaaagtacacaggtaacgtatctggatttaccccatcaattaacaactgcttgatctgcgctgtccggttaatgagtgttgtatcatcgcgccatttcaactcacttgccaggccattatagagagtccatacaattccagcgccagcaacagacagcagcaatataaaaagcaaggttaaacggacggttatagataatcttttcattatttttttaccgctacgaatgaatagcccatcccccggattgtggcgattagcttttcaggaaaaggatcatcaacttttgcgcggagcctgcgaatggcgacatccaccgtattggtatcactatcaaagttgattccccaaatttcactcgcaataaccgttctgggtataatctcgccagctctggaggccagtagccaaagtaactgaaactccttgcgcgtcagtgtaatactgatattgtccctgctcacactttgactgacagagtccatttttaagccactgatttctaatgttgaattcaaagcgtgatgttgccttaattgtgcccgaacccttgccagcaactcagaaaatgaaaaaggttttaccagataatcatttgccccactgtccagccctctgactctgtcatcgacagaatcccttgcagtaaggcaaataacaggggtttgctttgctgttcttaacgtttgtaagatctgccagccatccatacccggaagcataatatccagaatgatcaatgcataatcatccttcagcgcaagataaagtccatctctgccatcagaaacggcatcaatgacataacccgcttcggaaagcccctgcgttacccattcctgggtcctttgattatcttcaataagtagaatcttcatgaaaataatatgccataaatcatatgttatagaaacaacctggttcattacaaaattgtaatgctgctgtaaggttaccctggacgttttttcgctatcctcaaaactcattcacatgacaaggatataaacatgttaaagcgttatttagtactctcggtagcaacggcagcattttcattaccttctttggtttatgccgcacaacaaaacattcttagcgtgcacattttgaaccagcaaacaggaaaacccgctgccgacgtgacagtcactcttgaaaagaaagcggataacggctggttacaacttaataccgccaaaacagataaggatggacgaattaaggcactgtggcccgagcaaactgcgactactggcgattaccgtgtcgtatttaaaaccggggactatttcaagaaacaaaatcttgaaagtttcttccctgagatccccgttgaatttcatattaataaagtgaacgagcattatcatgtgcctttgttactcagccaatatgggtattcaacctatcgtggcagttaatgcgtaaatatgtaaaagctgatctctgctactgttagggaggtgactccctgacagattaacagtaaacggctcttgttggctaacgacaaaaaagtgtgatggcttatgaaaaagaatcaatttttaaaagaatcagatgttacggccgagtcggtattctttatgaagcgtcggcaggtgttaaaagcactgggcatcagcgcagctgcattttctttgcctcacgctgcgcatgccgatctgcttagctggtttaaagggaacgatcgtccgcccgcccccgccggaaaaccgctggagttcagcaagcctgccgcctggcaaaataacctgccactgacgccagcagataaagtctccggttataacaacttctatgaattcgggctggataaagccgatcccgctgctaatgctggtagcctgaaaaccgatccatggacactgaaaatcagcggcgaagtggcaaaaccattgaccctcgatcatgatgatttaacccgtcgcttcccgctggaagagcgtatttatcgtatgcgctgcgtggaagcgtggtcgatggtggtgccgtggattggttttccgctacacaaattgctggcgcttgccgaacccaccagcaatgcgaagtatgtcgctttcgaaacgatttatgcgccggaacagatgccaggccagcaggaccgctttatcggcggcgggctgaaatatccttatgtcgaaggattgcgtctcgacgaagcaatgcatccgctcacactgatgaccgtaggtgtttatggcaaggcgttaccaccgcaaaatggtgcgccagtgcgactgattgtgccgtggaaatatggctttaaagggattaaatcgatcgtcagtattaagctgacccgcgagcgtccgccaaccacctggaatctggtagcgcctgacgaatacggtttttacgccaacgttaatccgcatgttgatcacccgcgctggtcacaggctaccgaacgatttattggttcaggcggcattctcgatgttcagcgccagccaacactactgtttaatggttacgccgaccaggtggcatcgctgtatcgtggcctggatttgcgggagaatttctaaatgcgtctgacagcaaaacaggtgacatggctgaaagtttgcctgcatcttgccggattgttgccgtttctctggctggtctgggcgatcaatcacggtggactgggtgccgatccggtgaaagatattcagcattttaccggtcgcactgcactgaaatttttgcttgcggccttgttaatcacacctctggcacgctacgcaaaacagccgttattgatacgcactcgccgcctgttaggcttatggtgctttgcctgggcgacactgcatttaaccagttacgcattgctggagttgggcgtgaataatctggcgttattaggtaaggagttaattacccggccttatttaacgttaggaattatcagctgggttattttgcttgctttagcgttcacttcaacccagtcgatgcagcgaaaactcggcaaacactggcaacagttgcataacttcgtctatcttgtcgcgatcctggccccaatacattatctgtggtcagtgaagattatttcaccgcagccactcatctacgctgggctggctgtactgcttttagccttacggtataagaagttgctttcccttttcaaccggttacgcaagcaggcccacaacaaattatctctataacttcatattgccgacaaacttcgcgttatcccggccggatgcggcgcgagcgccctatccggcccacacagatcgcatcaagttatgtttcgtttgtcatcaacctttcatcaccagaataatttattttatttcaataagatagttaaatacacctgagaataccatgctctcatttcctaatgagttgttgcattttttcatatgttacaatataacattacacatcatgtacattaactctggaggaaattgttttggcgattcgtcttcataaactggctgttgctttaggtgtctttattgttagcgctcctgccttttcgcatggtcatcactcacacggcaaacccttaacagaggtcgaacaaaaagctgctaatggtgtttttgatgataccaatgtacaaaaccgaacgctcagtgactgggatggagtctggcaatccgtttaccctttactgcaaagtggcaaacttgatcccgtctttcagaagaaagcggatgcagataaaaccaaaacatttgctgaaattaaagattattatcgcaaaggttatgcgacagatatcgaaatgattggcattgaggacggcattgtcgaattccatagaaataatgaaacaacatcctgtaaatatgattacgatggatacaaaatactcacctataaatcaggcaagaaaggcgttcgttacttattcgaatgtaaagatcctgaaagtaaagcccctaaatatatacaatttagcgatcatataattgcaccacgaaaatcatctcattttcacatttttatgggtaatgattcccagcaatctttattgaatgaaatggaaaactggccaacgtattatccctatcagttgagtagcgaagaagtggtcgaggagatgatgtctcattgatttttttgcgctgacttcagttatttaacagaacagtgcctggtagtaacaacaataatttaccaagacaaataagtaagaaaaactcagacacgctcatacttgagtcgtgtcttttttattatgtctgtagaaaaaaactgagaaaaaggcgaacaataaatacacaactcagccatacagattggcagcgcaaatgtctccaggagcaagtcatctgtcatggtaaagctaaccagaaatataggttaattttggtgtttaaaccttttttacttgttagtatgatacaaaggctttcaaaaaagctgggaaattcaacaactcttggaaattatggactttgtcccgcggctttaatctgacggccgcgttccttttttggctcaattattgaccccttatctacgcaacttcagttcccgccagcaactttgcggcagtttcataggatcaatgtctaaaagaataatggtgaccgataagaaaacgactgaataactgtagattttcgctcgaaaccttcctgtcagacccatagcgaatcaagtgctgaatgtcacagtatcgaacagaaaacagtgacgatctaacccttcaagaatattctacgattgttctgtttaggaaaagcaaggcgggaagtcgggagataagtcattgataaagtggcggagagagggtctaaatttttagtgttcgacaatgcccaccaaagtgctatttttcctttaaaaacaaaatattgtcattatttttttgttcggtagtgtattgctactgtgcaaacaatcagctattttatgcagtaccgtatgtatggcgggttgtatgacaggattttgctatgccaaagaaggccaaggaactctcaggactcgtcgtatcacgattaaaatccgaaggcatgtatgccgttggtggtgtggatggtttataccttcgcatccgaaatcagtcccgtgcatgggttctttgcgtggctatgggaacccgaatcaacaatctcggtagaacagttccaagacgtttgaatatgggtcttggcccttacccggaagtctccttagccgaagcgcgtgacaaagcgcgtgagctacgtaaacaaatccgtaatggtattaatccccttcaggaaaaacacgagcaaaaagcccggcaggaaatactggcccggaagaaaaagacctttgccgaatgttgtgaagaagtgctggaagtcaaagacagtgagatgaagaacaaaaagcatctcgcgcaatggcgttccacactggagacctatgcctaccctttcattggcaaaaaggccgttagtgaaatcaccaaagtcgatcttctggcaatactggaacctatctggttaaccaagaatgaaaccgccagtcgtctacgtggacgtattgaaacggtgatcgattacgccaaggccaaagaatactttgaaggtgataatcctgctgcatggaaaggtatgctgaaacctctcctgcctcagccaagtaaagttcagatcaccaaacaccatgcggctcttccctataaccagatcggctcctttatgaaagaactgcgtgaacgaagcggcgtttcgcctcgtgcgcttgagtttgccatactgaccgcagcacgctcaggtgaaattcgtggtgccgagtggtcagagatcgatcttgaaggtaaaacatggaccatccccgccagtcgaatgaaagcaacgaaggagcatcgagttccgttgtctgatgctgctgttgccctgttaaaggctttaccacgctttaaaggtatcaattttgtattccctgccactcggaagggacaactctcggatactgctttactggcagtcctaaagcgaatgggatataccgacttaacgcagcatgggtttagatcgacattccgtgattgggctggtgaaacgaccaactacccgcgtgaggtaattgaacatgcgttagctcatcagttggcaaataaggcagaagctgcgtatcaacgtgggacgttatggcctaagcgggtggcgttaatggatgattgggcggggtattgtatttcttagacatacttgcggatgacaaaagctcaacttcctttactatacggacaggtattcatatacaataaatttctaatcatatttgattaaaggtttataatttaaggacatacaatatgaattatatagatgaacatgatataaactactcacgatatggttttgaatcgcttgcattagctcatcccgaaatagatataaagggattatggcattgtgattcaaaatattatgtgttgattgaaaaggatggaatactcactgaggatgacttaaaggaatttgaaaagatacaagaagagcatcgtattattggtagccctaaattattactaacacaaacactccctaataatgcaataaaaatcgcaggaagagaaaactacgaagttgctctttcttttggcgcaccatacacagattctgagttagaaaacatactttatcaatatataaataaaaaatttcatccatttaaatacacacttaaattaccatctcttcatctggttttgtcattcccaagaaaattgagtgatgatgaaaagtcagaaataggaacaacattatacagcgtcggtattaaatatgtaattgattatttaatagatgattcattattaaactttgaactatctgaaaaaaggcactctgatgcattagcgttaatacctaataaagcattacctaaaagtgtcccaacaagagtaagaaacctgcatgaagaagatgaggatttctggcttgataacagaagtttaattctcacttcatatgacttcgaaaaaagtagtgcccttccaacaagttttaacaaaaaaaatagttgttgtttcgttgatgcgcaaatttttaaaccagataatataagaaactatttatcagtttatgaacgagtagtgatatcatatccactcatcggacaagacaatgacttcttagaccatttaaaaataccgaaacaacatttactagagttaatatcgagaggtagaattcaatttgcattaccacaaaacataataagatataacttatcatttcttgaagaatgcctaaacactaatcctgaatgcattattctgtccagacgattagcatcatcctcaattattgacatcagaaataaaacaggttttcttgctacaacattttctttcgaagaaaaattaaatgttctcaaaacattgagggcactggatggcaaaatattcaacttatttatcaaggccctatctcaaaattggcactcaatggagatgaatatccatgagcgtggagccatgggtgtttcaaacattggcatagcccccgtcatgtcagagttattcaataggcaaggacgagaccttcttcttgaactattattttctgctatgccattggagtgggcgatggcattaaatgctgatttttatccataccacagcaatgagcattcacaatataatgcttctgcatgttgtttatatggatataatggttttagaataaatgaagaggctattgtaaaatctaaaatcggtgaaatagcaacaagaatactatcaatcgataatgacatgtcagccttagaattagacgacgcaatacttaaaggtgatattccgaggataagggatttttcaagatcgttgtctaatttatcaagtgaagagcttgatataaaaatttacgaactaaacaaagaaataaaaaaaatagaaaataaagaaagtaaactttcttcattagacttatgcggacttatagcatcaacaataggtgtttacgatgacaatccatatatcccatttggatttgccttttttaaaataatctctagcgtgttaaattcaaatgatattagctcgaaaaacatcgataaaataaaatcaacacttttaggtacgcaaactgaaacattgttaataaaaagaacgaaatccagaatgtaattagcatgcattttttgtaaattaacatacatgtcatatttttaccattatctttggcatgtatgttaatttgtaacaattaatagtataaacgtttaatgggaatttaatattttatttgcatgcatataaccttctaaaattactataacagtgctcgttcttactaccactacaacgacgttcatcatattccgcaataagtgttccagataaaaaaccataccttgagtcatacatcgaccccggacaagcacatgcacctgtatcactattgggtattacacatttatatccagatgtttgatcggttattgttataaaaatacctttcaggccatcaccgcttgctgtctgccatttaccactgacacacgataacactcgacctgtactgtctcgccccaccagaccattaggcgtacatttcgcatttaatgttgcctgaccattcaaatggagatattcacctgctttgattctgcctgttgattcaattgttccattggattttatcgttccagcagtaagattacctgacgcataaatattacccgcattgttcatgtaagctttaactgttttacctgttcctacaccaacagtccctgacgcatacaaatcataggtgcgaacaccaccagcccacccagcaggcagatcgtttggattaagtccattcgtcgcgatacgactaccaaacttcgccagacctgttgttgatagcgtgttcagataggtgtcggattttactttcaggttgttgttgatatttacaggaccattaagggtagatgttccacccacactcagatctgatgcaacagacgcattacccgttgtcttaagtgctccggttgttgttgtccctgatgccgtcatatctttgatgtttttgatgctcttcccaccaagattcagatcgcccgtcatcggcaacgtcccatcacgacgcagataaacagaatacattgaagagttataccccacgcggtaagccagtaacccaccccccgtgatattgctgtagctattagagttctcactccactgaccaccatagccggacgctatcttggtgtttctgctcatcccaccatcaacacctgccgcctgaaccgcttttcctaacaggtcataacgaatacgaccaccttcctcccacgggctggcggttgttataaggccattaatgacataatcaggcgctgttcctgaacgctttaacacaatcttgtaggatgctttttgcgcgttcgttcctgtatagcctacaggtaacagaccttcattaattaatgtctggtaagtgatttcacaaccagcagccgaacaggttcttggccccggatcgctactttgattgttggatgatgacagtgtggaaatcttgtcataacgaatactgatatagcggttaaccgcttcaccaagctgtttaatctgtgttccgacattatcagccaataccgcttcctgatcgtttctcatatcctgaaacttcataaaagcgataagcgttccaatacctaacacaatcgtcacttccagtaaggtaaatccttttttctttatcataattatctccctgttttagcaataagaaagaaaagggcctgcgccctcttcattaaatagacgtgaaaactaatgtattacttgtggcattcgtacatgctgctgccgtagctgccacatcgagtgttcctcctgcggctttaacaaccttggttccaaccgtagtaatgtagaaattacctgccgccgctgtcgcaatcttcacacattccgctgctggcacattatcgtatgtgatagtgaaagaagagccagtcgctgatgacggacctgtcgctgtagcagccagcgtcacattacctttaaaggcattgatgggtttagcagccgttcctgacccacttaacatattgtcagggaagatttttgcctgaacagccacagtatttgtcaggccagtaaagcttgatgccgacgtgtataacgctttaacacctgcctgtatggtggcaatgttattggattctgcctgcgctctttgtgaagcctgaaccttgggataaacgataaaagcagctaccactaatgcagcaatgatgcccaaaacaagtaatagttcgagtagtgagaaacctttcttgctttttcttttgttatttaataaaaccattattatctccttttttgttttaatgataactcctgttataacgcttctctgatatctggcaatagaaagagcaagatatatttaactctgtctgacagacggatgaattaaaaaaggcaaagatttctctttgccttccgggagatttaaaaacaatatttgttatcactactactgtcattactacttcctcatgggatatttatcatatctgataaaaaagtaataatgacgttcactacataaagataaaaattaacagattactggtcaaacagaacgcatgattgaaaaggaaaaaaatattaataaaggattatcctgcattctgttcttttatatagataacagataataattagatatcaatacctgaatcaaaataaatttaaagatttttatttttgtcttctatccatttgcgcgagaaacttcctgcctgcttttatatacgttattctttcaatatcattcaggtcagatactgaaagcaaaatccccataacaagctctttatccacctgttcgatatcgcaatgcatagccttagctacttccgcaccaagaataatctttagccttgtttcaactttcttacgttctgatttctccagagacttaagacgattaagttctagttgagcaaaagcaaccttttgctttaatgttttttctgttcttgtttttttactttcattatccatagttatcacctcttgctgtttatacgtatttaattatcacaaagagaaataacgtcaaatttacaccattttgtaagagagaatgattctgatacatttctttataaatatgtgcaacgcatatgatagtaattactaacttaaaataccccgcactctccgcgttacttatttttgcgcattcgtgcttttatttttacctgtcattttcaaactctatttcccaatctcaacctgtgaattgtgcaacacataacactgtctgttttattcgtttttttcatcaaatttagcagccccgccttacggcgggaataattaatacttcttttgcccttacgggccttatctttactctttttgtcctgtggacgtgaaacctacacctttaatccagtttgcgccgcttaacccggcgtattattttacaaccatacatatatttcgtattaattaataagaggggcattttacattggcttatttttttaaagacaatgcccacctatacactgctacgcagtgtgtggggtctaccgacggttgcctgccgcaggctaaaagcaaaaccaaggtcaacgtcaaccccgaagtttttcttacgaaaaactaacagtagcttatatatttgagattatatttttaatggcgatttttcatctggattttaaaattgtgaaacgaagcgaaggcatgacttccgttgcgaaagctgcctaccatgcccgtacacgtattacagatgatcgcattggcgaaacatttgatttcagccacagaacagatcttcatggtcatattttattagcccctgtttcagcacctgctcacattgttgaaagttcctcagcactctggaatgaagttgaaagagtggaacgccagaacaacggtcaaacagcccgttattttgatgttgctatacctgtagaactcaacaacgatgataagaaaaaattggttgccgaatactgtcagaagaactttgttgataaaggaatgattgctgatatcgcatttcatgacttggatagtaagaatccccatgctcacgtcatgttaaccctgaaaaccattggtccagacggcttcggtaaaaaagacagaagctggaatgataagaagataatgatccaatggcgtgaatcatgggccaccatgtcaaacagctaccttgaagccgcaggcagtgaagaacgtatcgatcaccgttctctcaggacacaatgtgctgatgcccttgctcaagcagaggaagcattcagcgctgaagagaaagcattctggcttgccaaagcaacagaaacaaaccgcccggcaatgcaacgtgttcatcgtgctaaatggaatgacaccgagtcacaggaacaacgagctgccgaacaagctcaacgtgatcagcaaatagaggaagcgaagaaggtctatacgacattcagtgagctaccactggagatcgtggttgatgtcagaagctttacgattacacatcttgctgaacccgaagagatcattatccctgactacccagcaacagtagaaccgcaaccggctatggcgacacctaccacaagcagaagaccagcagcaaaatcttaccgtaatcccaataaggtcagtaaagtaaatgtttcagggaagaaatcccctgttctggttgttcctgaaccaaaagcatccactaaattgaaaaccccatctcttcaaaacaccagagcggtgaaccgtgctcccctacatatcagaaagcagaccaagccacgacaaaatggtttgtttaaacgtttcacactactcatcgtagacttcctgaaagagagatttgtatgggcgagaaggaaaactgataccactgatgctgaccatgataagcgtatcgctgaaaattatgtgtttgatgaagtgctgggtgtcaatgttccacgctcggagtttgaaagacgcgctaagtttaacaataaccaaacatcacaagaagcaggagtctatggtaacgaatcaaatattaacaagactgttcgtttcccaaatcgttttgagcaagaacaaacggaggtcaataaacacatggaatttatactgtctattggtggaaaaccttctatgccaaagttaaaacaaactaacagaaaatctaacatcaaatagtaatgttatccccactattaatttttaatcaaatgcatgttacataggctcaaaatgtgatagcatatgaaaacatagaattttttatatgcttggtgaatgttttgggcaacaatatgtataatatccttttcttcatctttctttcaatagcaattccattccttttattcctcgcatggaaacagcacctaaaaaccaaagagattcgttcatatctattgaaagagggatataatattattttcaacggagaaggtaactcatatctcgcgtttaatattagtaatgcgacatttcgcgcaggtaatttaacttccaatgattattttcaagcatcaatttcttatatccacgattatagatgggagtggaaggaggttgaggcaaagaaaataaataatatatttattatttacatttcgaatattgatttcccttcccaaaaactattttatcgcaataataaatctttagcagaaatagactgggcaaaattacaagcaatttttcatcaaccatatgaaatacagaatgacgtcatgcaagataacaataatacgcactatgattttttcatatcccatgcaaaagaggataaagatacttttgtcagaccactggtagacgagttaaatagacttggtgtaattatttggtatgatgaacagacacttgaagtcggcgatagcttaaggagaaatattgatttaggcctaagaaaagcaaattatggcatagtcatactttctcataactttctaaacaagaaatggacacaatacgaattagatagtttaattaatcgtgcagtgtatgatgataataagattatattgccaatctggcataatatcaatgctcaagaggtatctaaatacagccattatttggcggataaaatggcactgcaaacttctttatatagcgttaaggaaatagcaagagagttggctgaaatagcatacaggagaagataaagcaataaatcataagtgcttaatatcttcgatgcataaaattaattgtattagcacatctaaatagtatgtttgttatggaatgagtgttccgtgctcattccacatattgtttagtatacgttgaaatattacagacctagcttagtataaacagatgtagggtatagataactaccactatttgaacttgagtaatagttaacacagtaattatctaatgcatatttaataattttaggttggaaagagacagatactgtataatgttctgaatctaaaagtggtttaggaatgaagttcttatcgactgttctatctccgtctaaattagctattacaacaggaagattaaattctacgataagatctatttcatgggcaagaaacgatactccatcgctaccttttctcttagtattaccgcttcccaacagtactacttgtttagcatttttcatcctttcgcggaggtttcgctttatggtttcaggtttacttgtatcccttgaaataaagagatcatgagcatcaaaaaagttaaagtctattttttcatttgctttccatgcctccataagacgataaaactttatatcttcacttgcaaaagccacatatgtcttattacgataactcatatagtccccatgaagcagtcaacattagtatcaacatgttgaaaataccttatatatcagatagtgtaaacatcatttataagaaactactatcaacacacttgaattacatataattaacaaggttggtacaaaaatggcgaaagttaattttttcgataagcgtatacttaaaaaattttcagactacacatcaactattagtaccatattttcactttttttgatttttgtagacattccaacagaaaacaaactaacacttggtattatatttttaattattttattcttactgtatttcggcatatggtttaaatcaaataatctttcggaaattaatttagatgttgagggcagcattgttactgtaaaagcaggcgatttattcagacaagatggattcaaggtcattgcttttaatgaatattttgacacgcaagttgatgatgttatcatttctcataattcacttaatggattatatattgataactatttagcgggatccgtatctgatttggaccatcgtatttcaaatcatcagtttgaagaagatgaactgcttgaggtcaaccataaaagaaaagtgggtaaaacacaaaaatattcgctaggaactatcttcgttaataatgattatctattaactgcgttttcaaaatttgacgacaaaaatagagcttttcttacaatgccggattatctagcatttttaataaatttttgggacaaagttaatcgtatatatgctcaaaaaagtgtctctgttcctatctttggatctggaatcactagaataaaggaacataaaaatattagcgatgaggatttacttaaaataatgttgtggacttttagaataagtgaaatgaggtttaaatttccggcaaagcttactatcgttatccacaaagataagatagataaaataaacttattggatataaaatcagcgagaaatggtctttagttatatttatatatgggcgaactatgaaaggtcgcccatcatataattcttttcgttttttatatctttcgcctaaacacaacattatcagagaatatcgccttaccagctataaacccaacaaccgcaattattggtagactgatagtagctcctgccatacctgttgacataccgatcaacgtcgataaaccaaaagtcaacaacaaaacaacagcagcataccagccgggataagtgccatataacacagtcgctaagcaacctgtgcaaacgtgaaccccacgctggctctctttgaaacagaacgggcatttgatggtattgttttccatattggtttccttaattggctttccagccattgctggtcttaaagagattcatggcaccatcagcaggttcattcattcctttaacgctggcgaatgcttttttgtcaatccagcccggaacgtcaaccagcttccacgtataagtcacgcgaactactttctgattaccgtttcccggctcagtccattccttaatcccgtcaacagcacgacgaccaacacaggcaccatctgttgtgctccagactttggcttttttgccttcctctgttatccctaatacgttcgaatcatagccctgctcaaagaccatcattccctgctctacaaatccatcgaggatcactgaattcgtccctgtaccagtcgaatcaagtcgtggcttggcaagacggatggggaagctggtgttattgttatccagcgagaagcaatatttgtcctgccctatcttggcattgatcgccttctcaaaatcacctttctcaccacatcccgccagtgccagagctgcgccagcaacgagtaaaatcttcttcatctgcttatccatcctgataatcaaagtgcctaaatttttgaccaaatctggtcagggctagagttgttgcgggatccggctgatatcacatggcaaaaccaccgcttaaccaattgataggattcaattcttttagcgtctcgtcatatcgtttaaaacgatcaaaaacaacctcatgatagccaatagctatcataaataaatattcgatcgataaaaacaattaataaccgatcaatatcattgttttaatcgttaaagcctatcaataattaattatcgatcttttatatcgatcatgatttcaagttctgatagccttgcaacgccgagaccgacgccatgagcttggtgctgtaggacgtataaaacgtagcaaagctctgtgagcaggttcagtctctttaactcatttacatggaggaagtaagattggaagcagtaggtatcgtatttttagtggtgctcttcatcatcatcatgacagcagtagatatacaaaagaaaaagcactacaacagctttacggaagttctggacggcgacattctttcgtatgaatgccaacagacaggtattgttattgatactcaaaaacatactgtccgtattttcaataaagataaagacagcacatatacttttgatcaaattcgagaaataaattatacgctttcagaggggggtaagttttatggcaatggaacattacgaggtatgaataatgcggctattgctaactggagagaacaactttcagcgaataaacggtctggcctaaatattttaaccgatgatattaaaaatcccatgtggaaagttaatgttcccctgaaaaatttaagcacctcaaatcacgaactttgcgagcgatggatgctggtatttaaaaagtatgttttctgagtctcacctttcatctatttctggaacaaaaatgaaaaaattattacttgctatttttataatattaccacttggtggctgtaccgttcatggtaataaatccctaactgatgaaaatcatcagacggttaaagttaaaatcgtcaagggaaaaacaacccaacaagaaattcttgctgcctttggagagcgctacgaatgatggacaggagatgtggaactactcaagtatgacgggagaaagccaactatctaactacataccgggccttgctctattgaccaatagcagcacagcacacattaaatcactggatatctggtttaagggtgatgttgtggaacgttatgattttcgtcagactgcaagtaagacctcacgtggtttgatggattgataatacaacatatcatcgtaaaatcgggagttgctacgtatgaactcccgattttatttcatgatattatatcaattaaatactaaataaattacataacaaacacttcttgtatattactaagcgtcttagcacctataccttttatgttttttaaaatatccagatcaagcttgccttcacgaactcgtgctttaacaatttctttagcgattgttctatttatatttaacaatgcttccagttcatctaaagtagctttattgatatcaggcttagatacagaggttttggtatttgacatatactcaagcaaatccgccactactaaatacgtgtgaaatactgactttacagcttcaatccgatctaactcggcatgaacacctttatttgttaacttattaactttatctaaccatgatccgagaaaatctatatgtgctttggcaaggtctttattactatcagactgaatagccccatccataaatgcccaaaggcggtttacgtattgaccttgcccaacggcccgaccattaaatttttccttcgatgccggataaagttcatcagccaacccttctagaagcctacgacatgtagttaaagcttgagaccattcttcttctttatctgaagaaatagctttaaatgccaacattagttgttctgcgatcactggatttagatctaataatttatcatcaacagcatttttcaatacatcaaaacagttgctgacagtacctgaaaattttagttgattatatatttgcgatgctaattcatgtgctttttttctaacataattgatatgttgatttaaactattcttataatacgttccgtcattgccttgtttttttcttacaagatcggcatatttctcttcaataaacccaatgttattatatccaccaccactttcaatattttttaatgtgagttcttcatctgaataatgtatattagccttaactcctaatttggcaagttcttgtattcgtttgtctaaattttcttggaaagatttattttttgtattttcagcctcaataacaaacttaagcaattcagttattggctttgtatatttagtatcacctaattgaatagcacaccatatctttttatcatcatcattgatgatatccgaagtccgctgtagtttttgtatagccgataacaaagaaccttttggtgactcgagttctttaagtgtttcttcaatgagctgtaatgctactttcttgtgtggcatgtgaatcatccttcaacttatagcttcgtaatcattaagtggtagattgttgcttttaaactaaaaatgaaactctggtggctcagccattttaataccaccaatacgtatgggcagctcaccttctcgttggcacaggttcttaatagattgccactcctcagcttctgtttccatgtgagcagcgaccgaatcaaaagcaccttcggctacgactatagtaggttctttatctgtttcattgccattcgaatccacttttggtacttcggccagttcttcttccagcccagccaaactcactttcagttcatcaagactactggcggcgtctattggcgcatagaagaacagcccactgatgaagatagcttccattacctcactgaaagaaaacgaggtatcgccataaacaaagcagccatgcttggaactcttcacccctgatacattcttcttcaacaggccgtcctttgccgacgtcatcaacgcctgtttgctatagaggattacaggaagatttttaatttcgtgaacatcaccgctgatactccagcgttctttatcacctttaatgaaacctgaagcatcgcagctactttctatgtcaaactcatcagtcgggaaccgctcacgattaaaataggtcgaaaaatcttccccttcttccatatcctgacgcttgtaagcgcgataaaccgagctacgacggtcaatcccaatccattcaatatcccatgtcgttggcccggacggttttcttacctcatctatataagcaccaacatctctgtccagataagctgctaacagtgccttccacagttctattgccagaaagatacttgccagcgatgttccttcttcaatcagaacagtatggtggaagaagcgaagaagaaagaagggatcggtattggctatcgtgttctggatggatagcaatggaaccgccgaggtttcatcgtaatcggactgaaaccgcagtattgcatcggaacaaaaaattaatttaccttccatcgctcatcgcctcctgacgctatcagacaacgcattttaccagaacactaccacttaccgcattcgactttaacctgacccatgttcgttgatagctctggatatatattcaacccaaaagcattgaccttatggataacatcacaatatctgaaactgataactcagattataacatctgtgattttatagtttcttcactcatttgtgtgagttctgaaaccaagcgaatataagtatttttcaacctatctttatcgcaacgacttacagactccgataacagataatggctataattattgacataaatatcattgtcattttcaatgagtgagttttattccatgttcagtatcttctactttgtttacaatacagatcataaatggtgttttctcatagggatgaaagagtgttatcattttaatatttttcattttattttttacttttttattactatttaatacaacatcgcgatcgtgaaaatcaaatttatttattttttaaccatgattttccctcttatttttaaactacttttgaaaaaatctttatctctgtgctgacgcacggctacgccctgacgctgacatttttattttattcatctcctgtctgttaaataaaaagaaaagcactcgatcattgtttgatctcttttcctcatgatgctgaatttagatcctatgtttaaacatagtttttccctttagacatatagcatttgctcttaaacgtataggaaaactacatccttggtagcagcgcttcgtgattgttgcgaacaatcactctgctgaacagggcttgcccctgttaatattggatttatccaaaaaagatcgcgtcgtagacgcatataaagttaaagtaaaattaatcaagcagtcccgatagtagcagcggttcatgattgtagaaaacaatcacttcgctgtaataacatagtaggaaaaataacacagataacaccactggtgccattttgataaggcaccaatcaactaaagagaagaactattttcaatattacattctttaaaatgtcatccaaagcttcgctatttgaataatgaagaagaaaaatgctctcaagccagctatagcttaaaacaaagtacgcactcttgggagttaaagtcccgaatcccggtacttaagttgataactattctcaaataaaaataataaagtgttattgtatatattctgtagcactacaatttttatacgtaaaaacatcaagtgttagttattttaaaaaatataaactttaagtattgacttgcacacaaaatatagtatctacttaaatgtataactaaaaaaataaaggagtaaataccatgatagaaaataagatacaaactgaagtaaagaaatcaagaagaggtctcccacgtcatactaaaaacccatttcttaatgatacaagtctacatacaaaaactggcgtcagacgtattactacaggaaaagatcgattagcattagttaatgagagtacgggagaacaagttggtaatggtggtttctttcagtctatggaagtagacaagacacagtttgtgaagctttatgtggatggcgtatcagctattgagggtttatcctcatccggtaagaaagtattcaagatactgtatcttgctatcagagataataaagatacagatacgatattaatgtcattcgatattgttgatcaagatatcgtgaaaatatcaagaactacttatttcaaaggtatgaaagaacttgctgacaagaaatttattgctgagaccatgatacagaactattattttattaatccagactatatgtttaatggtgatcgtttaactttcatgaaaacttattacttgaaggacaaaaaaactaaaactaaagagaacaaaattaattgccaaggcaaaacacagtagtttcaagaaagagattttctcaagcaactcctatctgaatgataactccataaagccaatgcattttaacaaactcccaccctactataaaaattgtatagggtgattaaaaaatgaagcgaaatcgaatgagaaaacgttttttatataccagtttacaaactcatatcttggagagctgctttttatcattgctgacatatcaattatattatgtgttgatctacgtagttctgatatatagagaacaaaatcaacatgttcataatgtggattttcaacaagaaaattaagttctgccattacatattcagattcataaggcattatcgattcattaagaataacaagtccaccgactgctctaggaatatttaaagattcctttgttgctctaatctgtctattggaggttgctacaagatcttttatatttctataagcataatccattatcttttttctgaaagcatctgagtcggggtgtttttgaatcaattcctcaatatgaaccctaccgaaccaacttcttttaagccattcatcagtcttagctagctcattaattttttcatttattaaatcagttctgtcatttgtgagtaatttttgctctaaaataacatcgttattaaataacaaataatctgccattttcgaactagagccatcgtcttttttgaaatcatccttcatatcgtccaatactatattatttttcttagatcgaataaaatcaagaaaccttttatctatagaatccatctttcctaccttcagttttatttcatcgtcccgagcctgatgatacaccatgtcatttgtctcttacaacattattaatgtattaagcatggccataataaacaacaaaaaaacattggcgagacaaatcaacagaaataaacattgctgcaaacggttaatttgacacttacaccatatctcgtaatataaatatatccactattttatccacgaggttttatatgagaaaagtaaaaacagacaacagtgatttaatcgaatatgtaaatacagttaaagaactaaaaaatcacattccaatagaagaatacagaaatgaatatcgtaaactgcgttctgatgatattccattggttaaggcgcaaaaatttaaatctgcccataccgaagttcgcaggttggaaaaaaagagagaatctcttattgaatactttattgacgagttaaatcccatcagcagttcaaaagctaacacatcagcaagatcaactggtaatctcgatttatttaacgaacgcgtgttataccgtaaggccatttcagaaaagagcgatgaagaaatagtagccttggtcataaaacaacgtacagaagccgctgttgagttccaacgttcaattgaacagagtcttgagcaactatctcgtatctcgtcagagttcgaaccatcaaaccaaaagcgcaggaaaatgtctctttaaaacgactctatgctattcgtgtgaaatgtgatgtattagattgcttatgcaataatgtttactatattatttactgactgtttttttttgatttttccaacagcaccgtaagcattatttttattaatcgcctattttaaaacaccggatgacatactatgagtgaagctcttaaggcactgaacaatattcgtacacttcgcgcacaggctcgtgaaacagatctggcaactctggaagagatgctggaaaaactcaccacaatcgttgaagatcgccgtgaggaagaaaattcagcccgtaaagaacaagaagaacgtcaggctaaactggaagccttccgccagaaattgttagaagacggtatcgatcctacagaactactcgcttcagttggttcatcccagcctaaaaccaaatcaactcgtgctcctcgtcctgctaaatacaaatatacagatgaaaacggtaatgagcagacttggacgggtcagggccgtactcctaaagcaatcgccgctgctatcgaagctggtaagacactggaagactttgctatctaaccgctacagcatatccgggcttcactgttctcaagataacaggcccggaaaatattcgattattcatccaagactatcccagtctggcaggttgttaacgacctttcgccaccaatgatacgcagccataagaacaccaaaacaaatacctgcgacgacgcttgagacaaatgcagtgcccggttgtatccctgtatccttccaagtaaaaaaccacatacagatcccccatgccggaccaaaccatccacccatcaacaaagtgatttgccagaatgaggcaaaaggtagcggtggtatcttgagtccagctttccatgcgaggtgtagcaaaggaggggcataattacttcgccacatcctcttgctttccatgatggcaatagcgtgtttctttttagcttcaaagcccataaggttccttccagatccacctttactcatctatctatcgataaaaagccacaatagacaataatgattatcaattccatgtatgtaagtcaaaaataactcaaatagtcattcctttagatcttctggtgaaacccggtcacatgccattttctcaagcattctttgtaatcttttcattttcaacttatgtgcttttttctcaccaatctcctgatagtattcttcacgacgttcgttgaccacgctcctgaattttttcaaaagctgttcaagtgttttgatgtcggtagttgcggcttccacttggatttttttatacatatacatcacatgaaattcatcaatcattttttgctccttggatagaaaaataatatttgttatcagccccaagaaggggccgatagacctcagaacatatcaacatattgattccgccagaaccgtataatgcattttggctaatgcctgcttaacccctttaaaatccacttcagacagttttccagcagcgttctttttccatgcttttttcagaagatgtttctcagcattcctcatcgccagatcgattagcttacaaacaaactcatgatccattacatgcgttataatcatattgctggtcgttttatcctttgagttaaaaagctccgcatagatatgcaaggacacaacataaaagatttcagtgtttttatttttaaatgtattcatttttatttcctctttagtttaatattggaatagcaaaatatttgtatgagcattagcggtatacacacttatagacaatccaaagctgacgaaggtgttgctttaccttacagtggtttacttctccataaatccgattccttttgccttcttctgtgtcatcgtaaaaatgatatcgcgtttttttaatgatactttccataatgtcattcatattgtatttattgttgagaaaataataaaaatcatctggtgcattccgccgtaatccgtccatatagttcctgaaataacattcggcttgttcaataaactcttttatcgtaataagttctatcttcatatttttctccattattgtttagggtaataagatgccctgtgcgaacagatatttgttcgacacgagatcttgtttctttttttatgcagcgttctggcgtgagtgtcgaatagtcacttcaatccattcatcaatctcactttcaacaaaagcgacacacctcggacctatttttactctgtcaggaaagtttccttccttaatacgctcatataaagtcgtgcgactaaatcccactcgatttaaaacatcaggaacgcggataaatcgttttacgctggtttcaatattttctttcattgtctgccctctattattgtaagtaatctctatgagatttcgcttttctctatgttgtttcgacgtgaacaatgatagcgattttgcttatggtaatttagggacgttcaaagaagttttttttgaaaaattcgaaggggcacggatggaaagataacggttaacactggatgcgatcacgttcgcacggagcgaacgtaaccctttttacttggcttattttttcttattcctgtcgtcttctacatgcttttcaacaggggagtctttcaagtgattgttttccatcatgtaatcttcaagcgatttcagatagctcgcatccgtcagaaaagccattgctaacgggtagtccgttgcctttagcattccttcatcacgatcgttgtcgctgtcctcgtgaagcagcgaggaaatcagtgaaagcgggattttaatgccgttatcttctccccagaagatcaggtccatcatcgggataagacgatattcaataatttttctgaatgtgcttttcccaaaacgatactctcttggcgctggagacttcatcttaagctgtctcttccatcgggggatcaacactttcagatgttcaatgatctcttcggttgatgcttcttccagatgaatatcgacagtaatacgtgaaagattattaagggatgtctctttcagatactcggacagaaattcagactggcttaacccagagagttcaggcgtggcttcggttaatgccagcgttttcgcataaaattgcgcgtggcttcgtgtcgtaggatttactgcgtaggttctggcaagctcatgtccaagagtagcggtatcaccactgaaaaagatttcaccgctgaggatcttgttgcggtaatcatccagcattaatcggttaaaggtaggtatggtgttccggctcaacaacattctgtaagccaagatgcgccgctcaacctcaacataaaaatgctgtaaggtgagtttctctatcgcctcatagcgttcaacatcaaaccatgcttccagtgctttcctgatttcacttcttttcatccatcctccaacaatccatttcctttgatatatcttcacaggatccgtttggaacaattgaagttcaactgttttgtcatcagagacgggggaatggctaagttgttgttaagagtgtgaactcgagagcataaaagtggatgcccgacgcgcggcaaaatggtaaaaaacagcatcagtagtaagaaaaattgagcgagagaaaggaattttaatgcagggatttatgcatgacaaaatcaaaaatgctttgtaagtgattgattttgttgaatgattggcggagagagggggatttgaacccccggtagagttgcccctactccggttttcgagaccggtccgttcagccgctccggcatctctccgttcagatggttgccatgatgccaggaaatttggcattttaacagtccctgtccgtgcaattttgttcaagtgacgagtttgcgagcaaaacgatgattaagtggccctggaaagtacaagaatcagcacatcaaactgcccttccctggcaggaagcactatcgatcccccttttaacgtgtctgacagaacaggaacaaagcaaattggtcgctcttgccgaacgttttttacagcaaaaacggcttgttcctttacagggctttgagctgaattcattaagaagctgccggatagcacttctattttgcctgcccgttctggagttaggactggaatggctggatggttttcatgaagtcttaatttatcctgcgccatttgtggtcgatgatgaatgggaagacgatatcggtctggtgcataaccaacgtattgttcagtcaggtcagagctggcagcaagggcctatcgttttgaactggttggatatacaagattcttttgatgcttctggttttaacctgattattcatgaagtcgctcataagctggacacccgtaacggcgatcgcgccagcggagttccctttatttcgttgcgtgaggttgctggctgggaacacgatcttcatgctgcaatgaacaacattcaggaagaaatcgaattagttggtgagaatgcggcgagcattgatgcttatgctgccagtgatcctgctgaatgttttgccgtactttctgaatatttctttagcgccccagaactttttgctcctcgtttcccttcattgtggcaacgtttctgtcaattttatcaacaagatcctttgcagagactgcatcacgctaatgatacagactcgttttcggcgacgaatgttcattaattaacaactttgcagattaattaaccaattgaaatggcttatgaaatttagtgttgacagacaaggtaccgctaagtaatatgcgccccgttctcacgattcctctgtagttcagtcggtagaacggcggactgttaatccgtatgtcactggttcgagtccagtcagaggagccaattttctgttttcttgcatccttgcgaatctttatctgatgttgattcaacaggttagtgtgaaaactcttctcggtgcattttgattttaccctacgcatcgggaaaaattggtggtcaaatctggggtcaggttagttcgataatggagtgacccccatatatcccttaccgacgcaaaaatccgcaccctcaagccttctgataaaccctttaaagtctccgattctcacggtctgtatctgctggtcaagccgggtggctcccgccactggtatctcaaataccgtattagcggtaaagaatcccgcattgcgctgggtgcctatccagccatctcccagtctgatgcgcgacagcaacgtgaaggtatccgtaaaatgctggcgctgaatatcaacccggtacagcagcgggctgctgaacgtggctcacgaacaccggagaaagtttttaaaaacgtggcgctggcgtggcataaaagtaacaggaaatggtcgcagaacaccgccgaccgtctgcgtgccagtctgaacaatcacatctttccggtcatcgggaacttacctgtatcagaacttaaaccccgtcatttcattgacctgctgaaagggatcgaggaaaaaggtctgctggaggttgcgtcccgcacacggcagcacctgagtaacataatgcgccatgcggtccatcaggagttaatcgatacgaaccctgcagcaaaccttggcggcgtgaccacacctcctgtcagacggcactatcctgccccgccgctggagcggctgcctgaactgcttgaacgtattggggcatatcatcagggccgtgaactgacccggcatgccgttctgctgatgctgcatgtgttcattcgctccagtgaactgcgtttcgcccgctggtcagagattgatttcacaaaccgagtctggacgatacccgcgacgcgagaacccattattggcgtgcgttattccggccgcggggcaaaaatgcgaatgccgcatatcgtccccctctcagaacagtccatcgccattctgaaacagattaaggatatcaccggtaataatgaactgatcttccccggcgaccataacccgtataagccaatgtgtgaaaacacggtcaataaggcactgcgggtgatgggttacgacacgaaaaaggatatctgcggtcacggcttccgggcaatggcatgcagtgcgctgatggaatcgggtttatgggcaaaggacgcagtagaacgccagatgagtcatcaggagcgcaataccgtgcgcatggcttatattcataaggcagagcacctggaagcccgcaaagcgatgatgcagtggtggtcggattatctggaagcatgccgagaatcttatgcaccgccttatacaattggtaaaaataagtttatcccatagtatactaacgaatcccacactctggcaaattaccaccacctccacaggaggtggttctatatagacttttatcaacttcatgacgaaaaacacctattttatcccaaaagaagacaatagagtcacagaggaatcaaagagcgactcaattgtctttggacaatctggttgtgaggttagaaaacagttactcctacaccattaaatagggcgcaatgctcgctaatttctcccgggtttctgtcagttcgcgttccggcgtagattgcgcgatgattcccgcccccgcctgtatccagcagcgctggctatcctgaaatacggaacgcagaactagcgccgcatcaaagcgcgtatcgtccagcagcaggattgcgccggaataaagctctcgcggcgtcttctcaatttgcataatcgcgttcagagcagcatttttagggatacctgaggcggtaatcgacggaaacagcacggtaaacgcatcccaggcatccttgttttccgcaagctgaccgctcacgccagaccccagatgctgaacgctgccgcgctggcgaaccgacattaaatcttcaaccaccacgctgcccggctggcaaacggcctccagttcagcaatagcttctttgacagaaaggatatgctcaagcacctctttactgtcgtgcagcagttctgcctctttcgccttattatgctccgggtttcccatgcgatcgcgggtgcccgcaagcggttcagtgaccactttattgcccgtcactgacatcaccagttccgggctaaagcccagcgcttcgcgtccttcctgacggaacataaacgagcgcacaggcgtgtttgcctgccgcccgtataacagcgtggcgggcatatcaatccgcgatggcaggggaatggcgcgcgagacaatcactttgacatactcgccacggcggatctccgcaacggcgcgcgcaacctgttgtttatatgcctcaccattgagggcggtatccaccgccagtggtgcgttctgcgtcgttgtaccggcctcttttacccactcgcacaaacgtcggcacccgtcggcggagtccgcataaacggtgacatttcccttttcaaaaataagttcttcacggggaacggttaacgtcagcagcggccactccccggcgttaaaggcaatcccccgcgcatgcgccgcaaagttgaacccaacctgtccatatacccgacgtcctttcacctgaggatgcgccataaaacgacgcgcgcagtcggcaatggaatccaccgcccatttttgctccccggcatcatcaataaatgtcgcctgcgttccgtcggcattaatgtgcagccgtgcctggcaccctttgcctaaataccaacagggttgacgctcatagacataacactcttcttctacgaactggcgtaaaacgccagaaatcgtcggtagccattgttcctctggtaacgccagatgtagaaattcactgattttcatcccttacctctctgtgttattcgcggatcaatcaattgcgcttgtcatcagttctcttgccgaatgcagccggatataagcaacccacgccgccagcaacgtgaatgccccggcaaacaggaagcaggccgcatagccaaaatgttgagcaacaacgccaccgataacgcctgccagaatggcgattgccgcatcagtacattgaaagagggtgaagtcgacaccggcctgcaaaggcgatgaaagcgacatcagcgtggcgtaaagacagaccagcgcgcaggccagcgaaatggactggacaatgaccagacactggagaatctgcagcagcagatgacccggcgccatcatgagcgtcatcaccaccgccagcagcgcgatcccctggacgccataagccgtcaacagcgctctgccgggtgaggtgtatttcatcagcaatccgccagccagcgttcctgctatgcccgctgcaatattgccgccgctgaacagcgcgcccaatgcggacatgctcaacccatgatccaacaacagcggtgccagaagaggcagcacaaaccgcatgcctgaattcagcatcaataccagcagtaagcccaggcgcgcctgcttcctccttagcgcataacctaacgccggaacatgcgggatagtcgctgttcgcgtcggctccgtaatgcgccacagcgggagtgacagcgccataatcagcaccgccatcatcagcatggcgacaggccagccggatgccgccgacagcatcaggaacaccccgccgccgcacatcattcccagatagctgccgccgacctgcacgctgtttccccagccgtaacccgtgcgggtcagttgatcgacacaaaagccgtcgctggcgatatcaatggtggaggcgaccgtgcctgccaccataaacagaacaaataacgcgacgatttgcgtatcggggaatcccccttctcgcccaaaccagccaatcgctgcggcaatagtcaggatcgccgctagcgcgacctgaccacgcaggattaacatgcgggaacggcgttcctggctaccgggcggaagccgccagcgctcgatccacggcgcccaaataaacttcagcgcccagggcagcataaacagggttgtcgcaccggcaagcgccagcgaaccgccagcagcgcgcaccagcgcgggtaaggactgcatagacagcgccgataccagactctgcgtcacatagacgccggcaatagcaaaaatcacccgcccggtcgtcaacgtcagcggtttcacattcgactgaacatcactcatgcacccactctccagacgcggaacccccgtcgtcgcgccacacgcgcgcggccatttgcgcctgccacagcgcctgataacgcccatgatgtgagagcaattgcgcatgagtaccctgctcaaccacctgtccctcttccatcaccagaatgtttccggccccggcgatggtggataaacggtgagcgatgataatcaccgtccggttgtaaaccaggttatcgatcgctttttgcaccgccagctcgctttcaatatccagcgcggcagtcggttcatcgagaatgacgaccggcgcgtttttcaataacgctctggcaatggaaatccgctggcgctcgccgcccgatagctggccgcccatctctcccattggcgtcagccagccttgcggaagacgggaaataaactcaaggcactgcgccgcgcgggcggcctcttctacctcctgccgcgtcgcctgtgggcgcgcgatacggatattcgccagcagcgtgtcatcaaacagccagacatcctggaaaacaacagaaatcaggctattgagctgttccggcgtcaggcggcgaatatcgacgccgccaatagaaatctgcccttgctgcggatcggcatagcgcattaacagtttggtgaccgtagttttgcctgcgccggaggcacccaccagcgcgctcatactggctgccgggaacgtcaaagaaacatgattaagcgcgtggccgtcaccttcttcgtagcgatagctgacgttgtcaaagcggatatcgtaacgttccggcatctcgctttgctctgcgacgggaagcggtgctatcgccataaactgctcaatccgttgcagggcgctggcgatcagttccacaaccgaggtgtagctgataaacatcgccatcggttctgcgaagcgcataatcatcgcgacggcggcaatcaaaaaggcgaggttcagagtgcccgtcactacccagacgatcccggataacaccaccacctgtaggcccaactccacgacgctggcgatcagcatcgtcgcgccagcgccctgacggtgagtgcgggtctgtaagttttccagcgcattgaaatgcgccagcagcgcccggcttttatcggcatcgctgccgcaggtgcgcaataccatcatcccctgagcaaattcaacgatatcgccgctcagacgctggtgcgcttcccccagcgtctgcatttgtcgccgcatcgccgggcggcgccagtaataaaacggcaccagcagagggaagatcagcaacatcaccagccccagccgccagtctatccacaatgtcgccagcgacgccgtcagcggcgtgacaatggtgagcagcaaaatattggctatcgcaataacataattgaggttttcatccacgctgcccagcagcaaggcgttcatttcacccgccctgccgcgctggagcttctccagcggcacgcggcgtaactgctcgccaagtcgcaggcgcaactcatgggtagcctgcgccagatgaccacggtattcaaagcccaggccataccagcgtagcaccagcgtcacaattgcggcgacgctgaaggccatagcccagttaagaagttgcggcgcgtctccccgtaacagcgcatcaatgatcggataaagacaggcaaaggcgatcccctgcatgaatgccgccagcaacagcgccagcatactgcgtcgcagcatcctggcctgactgccaacgctggagataagctggcgccagatgacgcgccaggccaggttatccgcaggattattgtctttcattttccaccacctcttcctgtgttccacccggcacccaatgctgcgcctgctgatagtgttgccagagccgttgatacaggccgccctgcgccaacagttgcgtatggttccccatttccctgagctgtccgtcggaaaacagcaatatcacatcggcctgagtcaccattgagagacgatgcgcgaccatgatgaccgtccggccacgcatggccgccgcgagcgccttgataagcgccgcttcgttttccgggtcagcaaacgccgtcgcctcatcgagcaccaggatggggcgatcctgcaaaagcgcccgggcgatagtaatgcgctgccgctggccgccggagagaaataccccacgttccccgactcgagtgttgtaaccttctggcagagcgctaataaaatcatgggcctgcgccactctggccgccgctataaccgcctccagcggcgtatccggcgcgcccagacgaatgttattggctatcgtgtcggcaaaaaggaagttgtcctgaaacacaaacgagagttgcttcatcagggtgtccgtctgcatatcacgcagatccacgccgccaatacggatatggcctttgtccgggtcggcgtaacgcagcagcaagcgcgccacggtgctttttccggcgccgcttggcccgaccagcgccacaatttgcccggcaggcacatgaaagctcacctcctgcaacgcggcgccagtacgcgcttgcggataatgaaagctcacctgctcaaaggtaatgctcgcctcttgcggctgctggtcagactgcggcagcgataactccggcatcgcgagaacctgataaatacgctgaatgcttaaacgcgtttgcgcgaccaggttattgagcatcatcattggcattacggcttcggccattccgctgcccagcagtaaaacggccacccacgcgataaaatcgaaactgccatagtgcaacaggccgtatcccgaccagatcaggacaaacagggtcgggagaggattcagaatcgagaaggaaaaacgcgctgaaaaaccggctttgcgataccaggttttgagcacatcgacccactcttcaagggcgcgttgatagcgcaaaaaactggtgctgccgctatcaaacgttctcaccacgggcatggcctgcacgaactcaataaccgccgcgctaacctgctcgcgcgccttatgataacgctgagccatatcttccgaacgctggcgggcgagcacgagaacaaccgatccaaacgccagtacccccagcgtcgcgattgccagccgccagtccagccagaacaagataacgattgtcgccagcggcatgatgatcgcgcgggcatagagcggcgtgctgtcggccacaaaaatatgtaacgacttcacgtcatccagcatcactttcgccactgacccgctgcccatttgctgtaacacgccaggcggaagctgcaatgctttacgggctaacctgctgcgcagaatgttctccagatgaaaagccgcgtaatgagaggtgttgaacgcctgtaagcgcagaacaaaagttaagaccacgcagccgatcacgccgcccagcggccaggccggaatagcgtcaggcgtcgcgcgaatgtcacgcaggctccacgccagaaaaaggagcgcccccaggctggttaatgccgccagccccgccagcgccatagctaaaataaccttcctgcgaaccggtgtaatcacctgccagagaggaaatcgggacagcgattcagtattggatgattgagatgacatgggagtaactgaatttcctgatgaatttttacggacgccaaaaacgacaattcagggtggcgttctgagaattaatgtgaataataaccattatcaataactcatctaccccattcggttctatttatacccgcattggtctaagccacagggagataaccaggtcatgatggagtcaccgcaaacgcaatctgaaatctctattcaccagttggtggtcgggaaacctgcaaacgatggcaatattcctgctcagtgtgaactgctgcgctgttcgttgcaggaaggtatggatattttgctctggaggggccattttgcgcggcctgagacgttgcagctacacgacgatctgggcaggattaacttctcgtgcatcctggaaggcacatcgcgctttgcgattcagggactccggcgccacaccgactgggagcttgcgcgcaatcgccattacattacccatacgccagactgtcgcggcagcgcctcctattgtggccgattcgagagcattaccctctccttcagccctgaaaccctcgcgctgtgggtgccggatattagcgcggtcattaagaataagatcgactcccactgctgttgccagcagcagcgttgtaatgctgaaacccacttaacggctcaggccttgcgtcacgcgctgatgcgcatgcacggcggcttcagtcatgaacaaaagccgtcgacgctatggttgcaggggcaaagtctggtcatgctcagtctggtgctggatgaacatcgcgaagacgccagttgcctctcctgccacttcaacccgatggaacgccagaaactgctgcgggcgaaggatctgctgctggctgatctgacgcaagcgccgggcgtcgcggagttggccagagagtccggtctgagcgttctcaaaattaagcgaggcttccgcgttctgttcaacaacagcgtctatggcctgtttcaggctgaacgaatgcaggaagccagaagacgcctggccaacggcaatacctccgtcatgacggtggcggccgatctgggctatgccaacgccagccatttctctgccgccttccagaaacagtttggcgtaactccttcgacctttaaacgcgggatgtaaccggggtcgcgcccccctaaactcctccctgacagaggcccggataccccatccgggcctctgttctttccgcctgttaccaacccgaaacgggcataaataaacccgtttcgggtagcatccaattgttaataattattattctcatatgagtaatgcttttcggtaagacgtgccatcaggaggaagaatgatttctggcgcaccatctcaggattcgctgttaccggacaaccgccacgcggctgattaccaacaattacgcgagcggctcatacaggaactgaatttaacgccgcagcagttacatgaagagagcaacctgatccaggccggcctggattccataagattgatgagatggttacactggtttcgtaaaaatggctaccgccttacccttcgcgagctgtatgccgcccccacgctggcggcatggaaccagttaatgctcagccggtcgccggagaacgcggaagaagaaacgccgcccgacgaatcatcctggccgaacatgaccgaaagtacccccttcccattgacgccagtacagcacgcctacctgacgggccgcatgccggggcagacgcttggcggcgtgggttgccacctgtatcaggagtttgaaggccattgtctgacggcgtcgcagctggagcaggccatcacgaccttgctgcaacgccacccaatgctgcatatcgcctttcgccccgacgggcagcaggtctggctaccgcaaccttactggaacggcgtcaccgttcatgatttacgccataacgacgctgaaagccgccaggcctatctggacgcactgcgccagcgcctgagccaccgtcttttacgcgtggaaatcggcgaaacgtttgattttcagctgacgctcttgccggacaatcgccaccgcctccatgtcaatattgacctgctgattatggatgcctccagctttacgcttttcttcgatgagcttaacgccctgctggccggagaatcgctgccggctatcgacacccgctatgatttccgctcgtatttgctgcaccaacagaagatcaatcaaccactgagagacgacgcgcgcgcttactggctggcgaaagcatcgacgcttccccccgcgcccgtcttgccgctggcctgcgaacccgccacgctatgtgaagtccgtaatacccgacgccgcatgattgttccggcaacacgctggcacgcctttagcaaccgggccggcgagtatggcgtgacgccgacaatggcgctggcgacctgtttttctgccgtgctggctcgctggggcggcctgacgcgtctgctgcttaacatcaccttattcgaccgccagccgctgcacccggcggttggcgcgatgcttgccgacttcaccaatattcttctgctggacaccgcctgcgatggcgataccgtcagcaacctggcgcgtaaaaaccagctcacgtttacggaggactgggagcatcgccactggtccggcgtcgaattactccgtgaactcaaacgccagcagcgctacccccacggcgccccggtggtatttaccagcaatctggggcgttccctctacagcagccgcgcagaatcgccgttgggcgagccggaatggggcatctcgcaaacgccgcaggtctggatagatcatctggcgttcgagcatcacggcgaggtctggctacaatgggacagcaacgacgcgctgttccctccggcgttagtcgaaacattgttcgacgcctactgccagttgattaaccaactctgcgatgacgaaagcgcctggcaaaagccgttcgcagatatgatgcccgccagccagcgcgcgatacgcgaacgggtcaacgccaccggtgcccccattcccgaaggcttgctgcatgaaggcattttccgtatcgctctgcaacagccgcaggcgctggcggtaacggacatgcgttatcagtggaattatcatgagctgacagactatgcccgccgttgcgcgggcaggttaatcgagtgcggggttcagcccggcgataatgtggctatcacgatgtcgaaaggcgcaggacaacttgttgcggttctggccgtcctgctggccggggcggtttacgttccggtttcgctggatcagcctgccgcacggcgcgagaaaatctacgctgacgccagcgtccggctggtgctcatttgtcagcacgacgccagcgccgggtcagacgatattcccgcccttgcctggcagcaggccattgaggcggagccgatcgccaacccggtagtacgcgcccccacgcaaccggcctacattatctacacctccggctctaccggtacgccgaaaggggtagtcatttctcaccggggagcgcttaacacctgttgcgatatcaatacccgctatcaggttggcccgcatgacagggtgctggccctctccgccctacattttgatttatcggtttacgacatttttggcgtactgcgcgcgggcggcgcgctggtgatggtgatggaaaatcaacggcgcgatcctcacgcatggtgtgagctgatccagcgccatcaggtcacgctctggaacagcgtcccggcgctgttcgatatgctgctgacctggtgtgaaggtttcgccgacgccacgccggaaaacctgcgcgcagtgatgctttccggcgactggatcgggcttgacctccccgcccgttatcgggccttccggccacaaggacaatttatcgcgatgggcggcgccaccgaggcgtctatctggtctaacgcctgcgaaattcacgacgtccccgcccactggcgctccatcccttacggttttccgctaaccaaccaacgctaccgggtggtggatgaacagggccgggactgccctgactgggtgccgggtgaattatggattggcggcattggggtcgcggaaggctatttcaacgatcccctgcgtagcgagcagcaatttttgacgctcccggacgagcgctggtatcgcaccggcgatctcggctgctactggccagatggcacaatcgagttcctcggtcgtcgcgacaagcaggtcaaagtcggaggatatcgcatcgagctgggcgaaatcgaaagcgcgctcagccagctggcgggggtgaaacaagcaaccgttctggcgatcggcgaaaaagaaaaaacgctggcggcatacgttgttcctcagggcgaggctttttgcgttaccgatcatcggaacccggcactgccgcaggcgtggcacacgcttgcgggaacgttgccctgttgcgccatctcgccagagatctccgcagaacaggtagccgatttccttcagcatcgcctgctaaaactgaagccgggtcacaccgctggcgccgatcctctccccctgatgaactcactcgctatccagccgcgctggcaggccgtggtggaacgctggttagcatttctggtgacacaacggcgactgaagcccgctgctgaaggttatcaggtctgcgctggtgaagaacgcgaggatgagcacccgcacttcagcggacatgatttaacgttatcgcaaattcttcgcggtgcccgtaacgaactgtcgttactgaacgacgcgcagtggtccccggaaagcctggcctttaaccatccggccagcgccccgtatattcaggaactggcgacaatttgccaacagcttgcacagcgcttacagcgcccggtacgcctgcttgaggtgggaacccgcactggccgcgccgcagaatcgctgttagcacagctcaacgccggacagattgagtatgtcgggcttgagcagagccaggagatgctgctgagcgcccggcagaggctcgccccctggcctggcgcccgtctgtccctctggaatgcagacacgctggcggcgcacgctcactcggcggacattatctggcttaataacgccctgcatcgtctgctgccggaagatcccgggctccttgcgacattacaacagcttgccgttcccggcgcgctgctctacgtgatggagtttcgccagttaacgccgtccgccctactcagcacgctcctgttaaccaatgggcagccggaggccttgctgcataacagcgccgactgggcggcattatttagcgcggccggcttcaactgtcagcatggcgatgaggtcgcggggttacaacgcttcctcgtacaatgtcctgacaggcaggtgcgccgcgatccccgtcaacttcaggccgccctcgccgggcgtctgccggggtggatggtgccgcaacggatcgtcttcctcgacgccttaccgctgacggctaacgggaaaattgactaccaggcgctgaagcgtcgtcatacccctgaagcggaaaacccggccgaagcggatttaccccagggcgacattgaaaaacaggttgccgccctctggcagcaactcttatcaactggcaatgtcaccagagaaaccgacttcttccagcaaggcggcgatagcctgctggcgacccgtctgaccgggcaacttcatcaggcaggttatgaagcgcaattaagcgacctgtttaatcatccccggctggcggattttgccgccacgctgcggaaaaccgacgtcccggtcgaacaaccattcgtccactcccctgaagatcgctaccagccctttgcgcttaccgacgtgcagcaggcttacctggtggggcgtcagccgggctttgccctgggcggcgtcggctcacatttctttgttgaatttgaaattgccgatctggatctcacccggttggagacggtctggaaccgattaatcgcccgccacgatatgctacgcgccgtcgtgcgtgatggacagcaacaggtgctcgaacagacgcctcgctgggtaatacccgcacacatcctccatacgcctgaagaggcgttgcaggtgcgcgaaaaactggcccatcaggtactcaaccccgaagtctggccggtattcgatctccaggtcggttacgttgacgggatgcccgcccgcctgtggctgtgtctggataacctgttacttgacgggctgagcatgcagattctgttggcggagctggaacatggctaccaatatccgcaacagttgcctccgccgctacccgtcacctacagggattacctgcaacaacccgcgatccagtcgcttaacgcagattctctggcatggtggcaggcgcaacttgatgatattcctccggctcctgcattgccgctacgttgcatgcctcaggacgtcgaaacaccgcgcttcgcccgcctgaacggcgcgctggacagcacgcgctggcatcggctgaaaaaacgggcggctgacgcccatctcaccccgtcggccgtactgttgtcggtgtggtcaacggttctctctgcatggagtgcacagcctgagttcacgcttaaccttacgcttttcgacaggcgaccgctgcacccgcaaatcaaccagattctgggcgatttcacctcgctgatgctgctgagctggcatcccggcgaaagctggctgcacagcgcgcagtcactacagcagcggctgagccagaacctcaaccaccgcgatgtgtcagccatccgcgtgatgcgtcaactggcgcaacggcaaaacgtgcctgccgttccgatgcccgtcgtctttaccagcgcgctgggctttgagcaggataacttcctcgcccggcgtaatctgctcaaaccggtctggggcatctcccagacgccgcaggtctggctcgatcaccaggtttatgaatccgaaggcgaactgcgctttaactgggattttgtcgccgcgctgtttcctgccgggcaggtggaacgtcagtttgagcagtattgcaccttgctaaaccgaatgaccgaggatgaaaacagctggcatttgccactcgccgcgctggtgcctcccgttaagcaggcggagcaaggtacagagcgcacatcgcgcgtatgccctgagcactctcagtcacacattgcggcggacgagagcaccgtcagcctgatttgcgacgccttccgcgaggtggttggcgagtctgtcacgcccgcacaaaacttctttgaggcgggcgcaacgtcgctgaatctggtgcaactgcacgttttgttacaacgtcacgaattttcgactctgacgttacttgacctctttacccacccttctcctgcagccctggccgcttatctgaccagtgtcgccacggtggagaaaaccaaacgctctcgccctgttcgccgtcgtcagcggcggatatagcgcgaagcaaactgattttccccggaacgccatcgcgaacgcatggcgttccattgactttatgaaccttaggaaatgggaccgattatggataacttgcgcttctcttctgcgccaacagcagattccattgatgcatcgatcgttcaacactacccggactgcgaacctgtcgcggttatcggctacgcctgccattttcctgaatcgccggatggcgaaacgttctggcaaaatctgctggaaggtcgtgaatgcagccgacgctttacgcgcgaagagcttctggccgtcggtctggatgccgccatcattgacgatcctcattatgtcaatatcggtacggtgttagacaacgccgactgcttcgacgccaccctgtttggctattcgcgacaggaagcggagtcgatggacccgcagcagcgcctgtttttgcaggcggtctggcatgcgctggaacatgccggttatgcccccggcgccgtcccccataagaccggcgttttcgcctcttcccggatgagtacctaccccggtcgcgaagcattgaacgtgacagaagtcgcgcaggtaaaaggtctgcaatctctgatgggcaatgataaagactatattgccacccgcgccgcgtacaaactcaacctgcacggcccggcgttatcggtacagaccgcctgctccagctcgctggttgccgtgcatctggcctgtgaaagcctgcgcgctggcgaatccgatatggcggttgccggcggcgtggcgctctctttcccccagcaggcaggctaccgctaccagcccggaatgattttctctcctgatggtcactgtcgtccctttgacgcctcggctgagggcacctgggccggtaacggtctcggctgcgtggtgctgcgtcgcctgagagacgcgctgctgtcaggcgatccgattatctcggtgatcctctccagcgcggtcaacaacgacggcaacagaaaggtcggctataccgccccttccgtcgcagggcaacaggcagtcatcgaagaggcgttaatgctggcggccatcgacgacaggcaggtaggttacattgaaacccacggcaccggcacaccgctgggcgacgcgattgaaattgaagcgttacgcaacgtctatgcgcctcgcccgcaggatcagcgctgtgcgctcggttccgtgaaaagtaacatgggccatctggataccgcggcgggcattgccggactgctgaaaaccgttctggcagtcagtcgcgggcaaattcctcccttactgaattttcacacccccaacccggcgctgaaacttgaagagagcccctttaccataccggtgtcggcacaggcatggcaggacgaaatgcgctatgcgggcgtctcctcctttggtattggcggcaccaactgccatatgatcgtcgcctcgctgcccgacgcgctcaacgcgcgcctccccaatacggatagcggcagaaaaagtaccgcgctgctgctcagcgccgccagcgacagcgcgttgcggcggctggcgacggattatgccggggcgctgagagagaatgcggatgccagctctctggccttcacagccctgcacgcgcgccgtctcgatctccccttccgcctggcggcgccattaaaccgtgaaaccgccgaggcgctcagcgcctgggccggtgagaaatcgggggcgcaggtttacagcggccacggcgccagcggcaagcaggtgtggctgtttaccggccagggctcgcactggcgcactatgggtcaaacgatgtaccagcactcaacggcgtttgccgacacgctggatcgctgtttttccgcctgtagcgaaatgctcacgccgtcactgcgcgaagcgatgtttaaccccgattcggcgcagctggacaatatggcctgggcgcagccggcgattgtcgcgtttgaaatcgcgatggcggcgcactggcgtgctgaaggactgaagccagacttcgccattgggcattccgtcggtgaatttgccgctgccgttgtctgcggacactatacgattgaacaggtcatgccactggtttgtcggcgcggcgcgctaatgcagcagtgcgcaagcggcgcgatggtggcggtatttgcagacgaagacacgctgatgccgctggctcgccagtttgagctggatctcgccgccaacaacggtacgcaacatacggtattttccgggccggaagcccgtctcgcggtattttgcgccacgctctcgcagcatgacattaactatcgtcgcctgagcgtaaccggtgcggcgcactccgctttactggagccgatactcgatcggttccaggacgcctgcgcgggactgcacgcggagccggggcaaataccgattatttccacgctcaccgccgacgtcattgatgagtcaacgctcaaccaggcggattactggcgccgacacatgcgccagccggtgcgttttatccagagtattcaggtggcgcatcaactcggcacccgcgtttttctggagatggggcccgatgcccagttggttgcttgcgggcagcgcgaataccgcgataacgcatactggatagccagcgcccggcgtaacaaagaggcgagcgttgtcctcaatcaggccctgctccagctttacgctgccggcgtcgctctaccgtgggccgacctactggcgggcgatggacaacgtatcgctgcgccatgttatccgtttgatactgagcgttactggaaagagcgcgtctccccggcctgcgagcctgccgacgcagcgctgtctgccgggctggaggtggcgagtcgcgccgcgacagcgctcgatctccctcgcctggaagcgcttaaacagtgcgccacgcgactgcacgccatctacgtcgatcaactggtacaacgctgtaccggcgatgccattgagaacggcgtggacgccatgaccatcatgcgccgtggacgtctgctgccccgctaccagcagctactccagcgcctgctgaataactgcgtggtcgacggcgattaccgctgcaccgacgggcgatacgtccgcgcccgccccattgaacatcaacagcgggaatcactgctgacggaacttgccggttattgtgaaggttttcaggctattcccgacaccatcgcccgtgccggcgatcggttatatgaaatgatgagcggcgcggaagaaccggtggcgattatcttcccgcaaagcgcctccgacggcgtggaagtgctgtatcaggaattcagctttggccgctatttcaaccaaatcgccgccggggtattacgtggcattgtccagacgcgtcagccccgccagccgttgcgtattcttgaagttggcggcggaaccggcggcaccaccgcgtggctgctgccggaactcaacggcgttccggcactggagtaccatttcaccgatatctcggcgctgttcacccgtcgcgcccagcagaaattcgccgactatgattttgtgaagtatagcgagctggatctcgaaaaagaggcgcagtctcagggtttccaggcacagtcttacgatcttatcgtggcagcgaacgtgattcacgccacccgccatattggccgcacgctcgataatctgcgccccctgctcaagccgggcgggcgcctgctgatgcgcgaaatcacccagccaatgcgtctgtttgacttcgttttcggcccgctggttcttccgctacaggatctcgacgcccgcgaaggtgagttattcctcaccaccgctcagtggcaacaacagtgccgccacgccggattcagcaaagtggcgtggctaccgcaggatggcagcccgaccgccgggatgagcgaacatatcattctcgccacgctgcccggtcaggcggttagcgccgtaacattcaccgcgccatcagaacccgtgttggggcaggcgctgacggataacggtgattatctcgccgactggtctgattgcgcaggtcagcccgaacggtttaacgcccgctggcaggaggcctggcgtctgctttcacagcgtcatggcgacgctctgcctgtggaaccgccccccgtcgccgccccggagtggctagggaaggttcgcttaagctggcaaaacgaagccttttcccgcggtcagatgcgcgttgaagcccgtcatcctgctggcgagtggctgccgctatcgcccgccgagcctcttcctgcgccgcaaacgcattatcaatggcgctggacgcccctcaacgtcgccagcattgaccatccgcttacctttagcttcagcgccggtacgcttgcgcgcagcgacgagctggcgcaatacggcatcattcacgatccgcacgcctcttcacgactgatgattgttgaggagagcgaggatacgctggccttagcggagaaagtgatagcagcgctcaccgccagcgcagccggattgattgtggttactcgccgcgcgtggcgagtcgaggaaaatgaagcactctctgcatcccatcacgcgctatgggccttgcttcgcgtcgcggccaacgaacagccggaacggttgcttgccgccatcgatctcgccgaaaacaccccgtgggaaacgctgcatcaagggttgagcgcagtctcactatcacagcgctggctcgccgcacggggtgacaccctttggcttccttcactgtcgcccaatacgggatgcgccgctgaattaccggcaaacgtgtttaccggcgatagccgctggcatctggtgaccggagcgtttggcggattaggccgccttgccgtgaactggctcagagaaaaaggggcgcgacgcatcgccctgctagcgccgcgcgtggatgagtcatggctacgcgacgtggagggcgggcagacgcgcgtctgccgttgtgatgtgggcgatgccgggcaactggccacggttcttgacgatctggcggccaacggcggcattgccggagcgattcatgccgctggcgtattggctgacgcgcccttgcaggagcttgatgaccaccagctggctgccgttttcgcggtaaaagcgcaggcggcaagccagctgttgcaaaccctgcgcaaccacgacggacgctatcttattctctactcttccgctgccgccaccctcggcgcgccgggtcagagcgcccatgcgctggcctgcggctacctggacgggctggcccagcagttttccacccttgatgcgccgaaaacgctctctgtcgcctggggcgcatggggagaaagcggtcgggcggccacgccggaaatgctggcgacgctcgccagccgaggtatgggcgcgttaagcgatgccgaaggctgctggcacctggaacaggcggtgatgcgcggtgccccgtggcgactggcgatgcgcgtttttaccgacaaaatgcccccgttacaacaggctctgtttaacatcagcgccacagaaaaagccgcaacgccggtcattcctcctgctgatgacaacgcctttaacggcagcctgagcgatgaaacagcggtgatggcatggctgaaaaagcggattgcggttcagctaaggctgagcgatccggcgtcactgcatccaaaccaggatctgttgcaactcggcatggactcgctgctcttccttgaactcagtagcgatattcagcactacctgggcgtacgcatcaatgcggaacgggcgtggcaggatctgtctcctcatggactcacgcagcttatctgttctaagccagaggcgacgcctgccgcttcgcagccggaagtgttgcggcacgacgccgacgagcgttatgcgcccttccctttgacgcccattcagcacgcctactggctggggcgaacccacctcattggctatggcggcgtcgcctgtcacgtcctgtttgagtgggataaacgccacgatgagttcgatctcgccatactggagaaagcatggaaccagctcatcgcacgccacgatatgttgcgtatggtggttgatgccgacgggcagcagcgaatcctggcgacaacgccggagtatcacatcccgcgtgacgatctgcgcgcgctttccccggaagaacagcgcatcgcgctggaaaaacggcggcatgaactgagctatcgcgttttgcctgccgaccagtggcctctttttgagctggtggtcagcgaaatcgacgattgccattaccgtctgcatatgaacctcgaccttttgcagtttgatgtgcagagttttaaagtcatgatggacgacctggcgcaggtctggcgcggtgaaacgctggcgccgctcgctattaccttccgtgattatgtgatggctgaacaggcgcgccgacagacatcggcatggcacgatgcctgggattactggcaggaaaaactgccgcaactgcccttagcgccagagctgccggtggttgagacgcccccggaaacgccacacttcaccaccttcaaatcgacgatcggcaagacagaatggcaggccgtgaaacagcgctggcagcagcaaggcgtcacaccgtctgccgcgctgctcacgctgtttgccgccacccttgagcgctggagccgtaccacaacatttacgctgaacctgacgttcttcaatcgccagccgatccatccgcaaatcaaccagttgattggtgattttacctccgtcacgctggttgattttaacttctcagcgccggtgacgttgcaagagcagatgcaacagacccaacagcgcctctggcaaaacatggcgcacagtgaaatgaacggtgttgaggtgatccgtgagctgggccgcctgcgcggatcacaacgtcaaccgctgatgccggtagtgtttaccagtatgctggggatgacgctggaaggcatgactatcgatcaggcgatgagccatctgttcggcgaaccctgctatgtattcacgcaaacgccgcaggtctggctggatcatcaggtcatggagagcgacggcgagttgatgtttagctggtactgcatggacaacgtgctggaacccggcgctgccgaggcgatgtttaatgactattgcgccatcctgcaagccgtcatcgccgcccctgaaagcctgaagactctcgccagcggcatcgccgggcacattccccgccgacgctggccgctgaacgcgcaggcggactacgacctgcgggatattgagcaggcgacgctcgaataccccggcatccggcaggccagagcggaaataaccgaacagggcgcgttgacgctggatatcgtgatggccgacgatccgtcgccatcagcggcgatgcctgatgagcacgaacttacccaactggcgctgccgttgcctgagcaggcgcagcttgatgagctggaggcgacctggcgctggctggaggcgcgtgcgctacaggggatcgcggctacgctaaatcgtcacggcctgtttaccacgccggagatcgcccatcgctttagcgcaatagtacaggcgctgtccgcgcaagcgtctcaccagcgtctgctgcgccagtggctacagtgtctgacggaaagagagtggttaatccgcgaaggtgaaagctggcgctgccgcattccgctcagcgagattcctgagcctcaggaagcgtgcccgcaaagccaatggagccaggcgctggcgcagtatctggaaacctgcatcgcccggcacgacgccctcttctccgggcagtgttctccgctggaattgctgttcaacgagcagcatcgcgttaccgacgcgctgtatcgcgacaaccccgccagcgcctgtctgaatcgctataccgcgcagattgccgccttgtgcagcgcagaacggattctggaggttggcgccggaaccgcagccactaccgcgccggtgctgaaggccacgcggaacacgcggcagtcgtaccacttcacggacgtctccgcgcagttcctcaatgacgccagagcccgtttccatgatgaatcgcaggtgtcttatgccttgttcgacatcaaccagccgctggatttcaccgcccacccggaggcgggttacgacctgatcgttgccgtcaatgtgctccacgacgccagccatgtcgtccagacgttgcgcagattaaaactgttgctgaaagccggcggacgtttgctgatcgttgaagcgacggagcgaaacagcgtattccagctggcgagcgtgggctttattgagggattaagcggataccgcgatttccgccgccgggatgagaaaccgatgctcacccgctccgcatggcaggaggttctcgttcaggccgggtttgcaaacgagctggcgtggcccgcgcaggaatcgtcgccgctgcgccagcatctgctggtagcgcgttcgcctggcgtaaatcgcccggataaaaaagccgtgagccgctatttacagcagcgctttggcaccggtctgcccattttacagatccggcaaagagaagcgttatttacgccgctgcatgccccgtctgatgcgccgactgagccagccaaacccacgccagttgccggggggaatccggcgctggaaaaacaggtggctgaactctggcaatcgctgctgtctcgccccgtggcaaggcatcacgactttttcgaactgggcggcgacagcctgatggcgacaaggatggtcgcgcagctaaaccggagagggattgccagggctaaccttcaggatctgttcagccattcgacgctgagcgacttctgcgcccatctacaggcggctacgtcaggagaggacaacccgatacccctttgccagggcgacggtgaggaaaccctgtttgtcttccacgcttcagacggcgatatcagcgcctggctgccgctcgctagcgcgttgaacaggcgcgttttcggcctgcaagcaaaatcgccgcagcgctttgccacgctcgaccagatgatcgatgagtatgtcgggtgcatccgtcgtcagcagcctcacggcccttatgtgctggcgggttggtcgtatggcgcgtttcttgcggcgggcgccgcacagcgcctgtacgccaaaggcgagcaggttcggatggtgttaatcgatcccgtgtgccgacaggatttctgttgcgaaaaccgggcggccctgctgcgcctgttagccgaaggacaaacgcctctggcactgcccgaacatttcgaccagcagacgcccgacagccagcttgccgactttatcagcctcgctaaaacggccggtatggtgtcgcaaaacctgacgctgcaagcggcagaaacgtggctcgacaacatcgcgcatctgctgcgtttactgactgagcatacgccgggcgaaagcgttccggtcccctgtctcatggtgtatgccgccgggagacccgcgcgctggacgccagcagaaaccgagtggcagggctggataaacaacgccgacgacgctgtgattgaagccagccactggcaaatcatgatggaagccccccacgttcaggcttgtgcgcaacacattacgcgctggctttgcgcaacctcaacgcaaccggagaacacgttatgatgccgtccgcctccccaaaacaacgcgtactgattgtgggcgccaaatttggcgaaatgtacctgaatgcctttatgcagcccccggaggggctggaactggtcggcctgctggcgcagggaagcgcccgttcaagagagctggctcatgcgtttggcattccgctgtatacctcgccggaacagataaccaggatgccggatatcgcctgtattgtcgtgcgttcgaccgtcgccggaggaaccggtacgcagcttgccagacactttctgacgcgcggcgtacacgtcattcaggagcatcccctccacccggatgacatcagttccttacaaacgctggcgcaggaacagggctgctgctattgggtaaacacgttttatccgcatacgcgcgcgggacgcacatggcttcgcgatgcgcagcagctgcgtcgctgcctggctaagacgccgccggtagtccacgccaccaccagccgacagttgctctactccactctggatttgttgttgctggctctgggcgttgatgccgccgccgtggagtgcgacgtggttggcagctttagcgattttcactgtctgagactcttctggccggagggagaagcctgcctgctgcttcagcgctatctcgatcctgacgatccagatatgcatagccttatcatgcaccgcctgctgctgggctggccggaaggtcatctttcgctggaggcgagctacggccccgtcatctggtcatccagcctgtttgtcgcagaccatcaggagaacgcccacagcctctaccgcagaccggagatcctgcgcgatctgccgggtctgacgcgcagcgcggcgcccctgagctggcgcgactgctgcgaaaccgccgggccggagggcgtcagctggttgctacaccagttgcgcagccatctggcgggcgaacatccaccagcggcctgccaaagcgtacatcagatcgcgttatcacgtttatggcagcagattttacgtaagaccggcaatgcggagatcagacgcctgacgccgccgcaccacgaccggttagccggtttctacaacgatgatgataaggaggcgctgtgacgcaatctgcaatgtgcatcccgctgtggcccgcccggaacggcaatactgcgcatctggtcatgtgccctttcgctggcggcagcagtagcgcgtttcgccactggcaagctgagcaactggctgattgcgcgctttctctggtgacctggccggggcgcgatcgccttcgccatctggaaccgctcagaagcattacacaactggcggcactgctggcgaacgagctggaagcatccgtatcgcctgacacgccgcttttactcgccgggcacagcatgggggcgcaggtggcgtttgaaacctgccgacttctggagcaacgggggcttgcgccacaaggactgattatttccgggtgccatgccccgcatctgcattctgaacgccagctcagccatcgcgatgatgccgactttatcgctgagctgatagacattggcggatgttctcctgaactgcgggaaaaccaggaattaatgtcgctgtttcttcctcttctgcgcgctgatttttacgccaccgagagctatcactacgactcgcccgacgtctgtccgccgctgcgcacgcctgcgctgttattgtgcggcagccacgatcgcgaagcctcctggcagcaggtcgatgcctggcgtcagtggctgagccacgttacaggcccggtggtgattgacggcgatcatttctatcccattcaacaagcccggtccttttttacgcagattgtccgccattttccccacgcattttctgcaatgaccgcgtggcaaaaacagcccagtacttcagaaaggtgacgcatgaattcttcctttgaatctctgattgaacagtatcccttacccattgccgaacagttgcgccactgggcggcccgttatgcctcgcgaattgccgtcgttgatgcaaaggggtcgttaacctacagcgcgcttgatgcacaagttgacgaacttgccgcaggtctgtcatcactgggtttgcgttcgggggagcatgtaattgtgcagcttcccaacgacaacgcgtttgttaccctgctgttcgccttgttaagactgggcgttatccccgtgctggcgatgccctcgcaacgggcgctggatatcgacgcgctgattgagctggcgcaacccgtcgcttacgttattcacggggaaaaccacgcagagctggcccgacagatggcgcacaaacacgcctgcttgcgtcatgttctggtcgctggagagaccgtgagcgacgattttacgccgctcttctcccttcacggtgagcgacaggcatggccgcagcctgatgtttccgccaccgcgttgttgttgctctcaggcggcacaaccggcacgcccaaactcatcccgcgccgacatgccgactatagctataacttcagcgcttctgctgaactgtgcggcatcagccaacagagcgtgtatctcgccgtcctcccggtggcgcataactttccgctggcctgccccggtattctgggaacgcttgcctgcggcggaaaagtggtgctgaccgacagcgccagctgtgatgaggtgatgcctttaatcgcgcaggaaagagtgactcacgtcgccctggttccggcgctggcgcaattatgggtgcaggccagggagtgggaagacagcgacctttcgtcgctgcgcgtcattcaggcaggcggcgcccggctcgacccgacgcttgctgagcaggttatcgccacctttgactgtaccctgcaacaggttttcggtatggcggaaggcctgctctgttttacccggctggacgatccgcatgccaccattctccacagccaggggcgcccgttgtcccctctggatgaaatccgcatcgttgatcaagacgagaacgacgtcgcgccgggcgaaaccgggcaattgttaacgcgcggcccttataccatttcgggctattaccgcgcccctgcccacaatgcgcaggcctttaccgcgcaagggttttaccgcacaggcgacaatgtcaggctggatgaggtggggaacctgcacgttgagggacgcataaaagagcagatcaaccgcgccggagaaaaaatagccgcggctgaagtggaatcggcactgctgcgtttagcggaagtgcaagattgcgcggtggtcgccgcgccggacacgctgcttggcgagcggatttgcgcgtttatcatcgcgcagcaggtgccaactgactatcagcagttgcgtcaacaactgacccgtatggggctcagcgcgtggaaaattcctgaccaaatcgagtttctggaccactggccgctcaccgccgtcggcaagatagacaaaaaacgcctgacggctctcgccgtcgaccgttatcgccattctgcccaataagcgcaaaccgacccgaaacaggttgaaataaacccgtttcgggtagcaccactattagaaatagttatcattttcaattcaccattgtcggtatttttggcgtttcgccgtcttacagggactcacaacaatgaaaatgacacggctttatcctctggccttggggggattattgctccccgccattgctaatgcccagacttcacagcaagacgaaagcacgctggtggttaccgccagtaaacaatcttcccgctcggcatcagccaacaacgtctcatctactgttgtcagcgcgccggaattaagcgacgccggcgtcaccgccagcgacaaactccccagagtcttgcccgggctcaatattgaaaatagcggcaacatgcttttttcgacgatctcgctacgcggcgtctcttcagcgcaggacttctataaccccgccgtcaccctgtatgtcgatggcgtccctcagctttccaccaacaccatccaggcgcttaccgatgtgcaaagcgtggagttgctgcgaggcccacagggaacgttatatggcaaaagcgctcagggcgggatcatcaacatcgtcacccagcagccggacagcacgccgcgcggctatattgaaggcggcgtcagtagccgcgacagttatcgaagtaagttcaacctgagcggccccattcaggatggcctgctgtacggcagcgtcaccctgttacgccaggttgatgacggcgacatgattaaccccgcgacgggaagcgatgacttaggcggcacccgcgccagcatagggaatgtgaaactgcgtctggcgccggacgatcagccctgggaaatgggctttgccgcctcacgcgaatgtacccgcgccacccaggatgcctatgtgggatggaatgatattaagggccgtaagctgtcgatcagcgatggttcaccagacccgtacatgcggcgctgcactgacagccagaccctgagtgggaaatacaccaccgatgactgggttttcaacctgatcagcgcctggcagcagcagcattattcgcgcaccttcccttccggttcgttaatcgtcaatatgcctcagcgctggaatcaggatgtgcaggagctgcgcgccgcaaccctgggcgatgcgcgtaccgttgatatggtgtttgggctgtaccggcagaacacccgcgagaagttaaattcagcctacgacatgccgacaatgccttatttaagcagtaccggctataccaccgctgaaacgctggccgcatacagtgacctgacctggcatttaaccgatcgttttgatatcggcggcggcgtgcgcttctcgcatgataaatccagtacacaatatcacggcagcatgctcggcaacccgtttggcgaccagggtaagagcaatgacgatcaggtgctcgggcagctatccgcaggctatatgctgaccgatgactggagagtgtatacccgtgtagcccagggatataaaccttccgggtacaacatcgtgcctactgcgggtcttgatgccaaaccgttcgtcgccgagaaatccatcaactatgaacttggcacccgctacgaaaccgctgacgtcacgctgcaagccgcgacgttttatacccacaccaaagacatgcagctttactctggcccggtcgggatgcagacattaagcaatgcgggtaaagccgacgccaccggcgttgagcttgaagcgaagtggcggtttgcgccaggctggtcatgggatatcaatggcaacgtgatccgttccgaattcaccaatgacagtgagttgtatcacggtaaccgggtgccgttcgtaccacgttatggcgcgggaagcagcgtgaacggcgtgattgatacgcgctatggcgcactgatgccccgactggcggttaatctggtcgggccgcattatttcgatggcgacaaccagttgcggcaaggcacctatgccaccctggacagcagcctgggctggcaggcgactgaacggatgaacatttccgtctatgtcgataacctgttcgaccgtcgttaccgtacctatggctacatgaacggcagcagcgccgtcgcgcaggtcaatatgggtcgcaccgtcggtatcaatacgcgaattgatttcttctgattattgtaaaagggataccgaaaaggtatcccttttacaccactagttaaaaccagtaactcagcaaagtcgcaaaaaatattaatccatagtgattatttaaacaatgaaattgcgattaggataaatagatttaactttctcgttcctttctctccttatactaaagaaataatcatatcaaaataaaaattcacaacagtgcaacattaaaaaatacaaccaacaaacaatcctatatacaaggcacatctccagaatataaaagcacagacaaacaacctaaaaaaaaaccatacatataaattattttataggtaaaatagattatatattctcatagctaccacaaactatactagcctgaactatatttattctgctgcaatcaatgcatacataacacaaatatcactcaggtacactactcaaaccacgctgggatttttcctcaagttataatcatcaccccgaaaatcattcggcatttactcattaaatagtcaccccataggcctgtacatgtttactcagaaatatacatccttttctctgtcataaaccctctgattaatcatagataaatacttgtgacaccaatctttttccttaaaggaacgaattgttgtgtagaaggagataatattatgtcaaaaaaatatcagcctttgcttataactcattatatgtcaacatgggtcactataacggaagcagttgagatcactaccaaagccataaaacaaaaaattactcctagcgatatttatcgtcatgccttgagtggcaacatcctactatcggtctatttccagtctcctgtgatacttaagaagatacaaacttttaatggaaaaataaaattcaggcagtttgtgggagacctacttgataaactatgcatgcttgacagggacggttttatttatggtcaaaatttaagactctgtacagaagccagatatatttgtcctgtgcaacaaattatagatacccccctgttacgcaaactcaaccagtttcgtacgtttgttcgtaatgtccgcccgggtgatgaactggatgtcccggcacaagttagtgaaaaaaatttaaccccgccgccgggtaacagcagtggcaaccttgagcaacagatagccagtacttcacagctaattggatctctgctcgccgaagatatgaacagcgagcaagcggcaaacatagcacgtggatgggcctcttctcaggcttcaggggtaatgacagactggttaagccgcttcggtaccgcaagaatcacgctgggcgtggatgaagatttcagcctgaagaactcccgtgacggcaaccctcgaaaatggcgattcgatgcaacaaacagtgaactatgtgccgaacgtcacgaatgctgaaatcacgctggcagcctcgaaggatccggtgattgccgacaataacgatctcacgacactaacagcaccgtcgctgatacagagggcaatgcgatagccaacactgaggtaacatttactctaccggaagatgtgaaggcgaacttcacgctgagcgatggcgacaaagcggttactgatgccgatggcaaagcgaaagtcacgctgaaaggtacaaaagcaggcgctcataccgtgacagcatcgatggttggcggtaagagtgagcagttggtggtgaactttactgcggatacgctcactgcgcaggttaatcttaacgttaccgaggacaatttcatcgccaataacattggaatgaccaggctacaggcaacagtgactgatggaaacggcaacccagtagaaggtataaaagttaatttccgcggaacctccgtcacgctaagcagcaccagcgttgaaacggatgatcaggttttcgctgaaattcttgtgacaagcaccgaggtcggactaaaaacagtttcagcctctctggcagataaacctactgaagtcatctcgcgattactgaatgccaaggtagatgttaattctgcgacgattaccagtcaagagatacctgaaggtcaggtcatggtcgcacaagacatagcagttaaagctcacgttaacgaccagtttggcaacccggtgacgcatcaacccgcgacattcagtgcagcgccatcctcgcaaatgatcatcagccagaatacggtctctactaatacgcagggagtagccgaggtcaccatgacgcctgaaagaaacggctcgtatactgtaaaagcatccctagcgaatggagcttcacttgagaaacaactggaggctattgatgaaaaactgacactcacgtccagtccgcttatcggtgtcaatgctcctaaaggcgctactctgacggcaacgctaacctctgcaaatggcactccagtggagggtcaggtcatcaactttagcgtaacgctagaaggtgcgacgttaagtggcggaaaagtgagaaccaactcttcaggtcaggctccagtcgttctgaccagcaataaagtcggtacatatacggtgactgcatcgttccataacggcgtcacaatacagacacagacaaccgtgaaggttactggcaacccaagcaccgcacatgttgctagctttatcgctgatccgtcgactatcgccgccaccaacagtgatttaagtaccttaaaggcaacggttgaggatggcagtggtaacctgatcgaaggtcccactgtgtacttcgccttaaaaagcggctccaccacattaacgtcattaacagcggtgaccgatcaaaacggaatcgcgacaacaagcgtgaaaggtgagataacggggagcgtcactgtaagcgcagtcacaagcgcaggtggaatgcaaacagtagatatatcgctagtggcaggcccagcagacgcctcgcagtccatccttaagaacaaccagtcatcactgaaaggggactttaccgatagtgctgagctacatcttgttctgcacgatatatcaggcaatccgatcaaagtttcttaagggatagaatttgtgcaatcaggtacaaacgtgccctatatgaaaattagcgcaattgattacagtcaaaatatcaacggtgattacaaagctactgttacaggaggcggagagggtatcgcaacgctgatccccgtattgaatggtgttcatcaggcgggtctgagtaccacgatagaattcattagcgcggaaaccagaccaatgacgggtacagtgtcagtgaatagtgcaaacctaccgacagcttcattcccttcgcagggatttaccggggcgtattatcagttgaataatgacaactttgcaccaggaaaaacggcggctgattattcgttttcaagctcggcctcctgggtaggcgttgatgctactggtaaagtgacattcaaaaatgacggtgatagcaatactgtaataatcacagcgcccccaagatccggtggtgctatttaccaaacagttcctcctgaatcgcgttcggtgtgactatgatcattttcggtgagtattgctttgatccaaaggctggttttctgtgatgattgaccagcctcagagtattgatgacaccaccgttcataacagatcggcattactatgcataagtactgcctcaaattctcgccaaaacactttttaatgcctttgcgaattcatccagacttatattgtcaattttttgcccaacgacgactgactccgaaacatcggccattgcgggccatcgcgttttgtaatcagcataaattgcaacaacaggggtattataggcacttgccatatgtaatattgaggtgtcaggagttattgcaatataagcatcttttatgattgctgctgaacgtttaatcgagggtgataaggataaacggtagacattattataacaatccactaatgccctggctttatcttcccctttgggtccataaacgatcactattggaatatctgtttcactttgaatttttgctattagattttctgcaatcgataatgaaaatgtacgttcctgcgagctaccgtctaaattgagcgcaatgtaagatcctaacgatcgcatttcctcgcgtacctcatcgagtacatcatcgcttaatggcaattcatatattgacctgactgccggaaaacccgcctcacgcatcataaatgcccatgtcatgggtacaggagtccggagattctgatccatccgggacgcgttcttacacaaaggggaatagcacttcatggttaaaccgacgacctggaaattcgtttttgctttcaactgactgataaatatcatcgttttcaggttctttttacgcatcgcctctatacaaagatccggcgtaccgtattgcagtgttatgttcttcgctaaatcttttatttcttttaatgttgcgtgatcctgcatagtcattgtgactaatgttaatttagtctgttcaagtttgagcgcattaaagacttctaaattaattgtcgacgtaacaattaatagatgcttaattttatgcaattcaagcgcccgaataacaggaaagatggccatagcatcgccaatctgatcgggaatatgtatgacaacaaagtctgttttttcaatattaaaattataagctttataatcgtagtaactaaatgcaatacgtctcaacaatgatactaaaaacataactaacctcgcctccctactggttataatgcaatgcagtctatcagaatcatcagggtgcaattttgtgcatatgcggacttttatgtttcatatctcgaacctgtgggccctctgcttaatccttaaacaacaccagcaactcctgcgctttcatcttccatcgaatttttcatgttgccgctaatcagccataaaatcatttgcagatgcgctctgtcgaggtagtctcataaggttcgtttatagatcgacggcaatgtgagttaccttttccatactaattataaaaagacagtacaaacaggatcattatggactccacgctcatctccactcgtcccgatgaagggacgctttcgttaagtcgcgcccgacgagctgcgttaggcagtttcgctggtgccgtcgtcgactggtatgattttttactctatggcattaccgccgcactggtgtttaatcgcgagtttttcccgcaagtaagcccggcgatgggaacgctcgccgcatttgccacctttggtgtcggcttccttttccgaccgctcggcggtgtcattttcggtcactttggtgaccggctgggacgtaagcgcatgttaatgctgaccgtctggatgatgggcatcgcgacagccttgattggtattcttccttcattctcgaccattgggtggtgggcacctattttgctggtgacactgcgtgccattcagggatttgccgtcggcggcgaatggggaggcgcagcgttgctttccgttgaaagtgcgccgaaaaataaaaaagccttttacagtagcggtgtacaagttggctacggagtaggtttactgctttcaaccggactggtttcattgatcagtatgatgacgactgacgaacagtttttaagctggggctggcgcattcctttcctgtttagcatcgtactggtactgggagcattgtgggtgcgcaatggcatggaggagtccgcggaatttgaacaacagcaacataatcaagcggccgcgaaaaaacgcatcccggttatcgaagctctgttacgacatcccggtgcttttctgaagattattgcactacgactgtgcgagttgctgacgatgtacattgttactgcctttgcacttaattattcaacccagaatatggggttaccgcgcgaacttttccttaatattggtttgctggtcggtggattaagctgcctgacaattccctgttttgcctggcttgccgatcgttttggtcggcgcagggtttatatcacaggcgcgttgatcggaacgttgagcgcatttcctttctttatggcgcttgaagcacaatctattttctggatagttttcttctccataatgctggcaaacattgcgcatgacatggtggtgtgtgtgcaacaaccgatgtttaccgaaatgtttggtgccagttatcgctacagtggtgctggagtcggttatcaggttgccagtgtggttggcggtggatttacgccttttattgccgctgcactcatcacttactttgccgggaactggcatagcgtcgctatttatttgctggctggatgcctgatttccgcaatgaccgctttgttgatgaaagacaatcaacgcgcttaatagcctggcgaagatcatccgatcttcgccttacacttttgtttcacattcctgtgacatactatcggatgtgcggtaattgtatggaacaggagacacacatgaataataagggctccggtctgaccccagctcaggcactggataaactcgacgcgctgtatgagcaatctgtagttgctttacgcaacgccattggcaaatatattacaagtggcgaattacctgatgaaaacgcccgcaaacaaggtctttttgtctatccatcactgaccgtaacctgggacggtagcacaactaatccccccaaaacgcgcgcatttggtcgttttactcacgcaggcagttacaccaccacgattactcgccctactctctttcgttcgtatctcaatgaacaacttacgttgctgtatcaggattatggtgcgcatatctctgtgcaaccctcgcagcatgaaatcccttatccttatgtcatcgatggctctgaattaacacttgatcgctcaatgagcgctggtttaactcgctacttcccgacaacagaactggcgcaaatcggcgatgaaactgcagacggcatttatcatccaacggaattctccccgttatcgcattttgatgctcgccgggttgatttttccctcgcacggttgcgccattataccggtacgccagtagaacattttcaaccgttcgtcttgtttaccaactacacacgttatgtggatgaattcgttcgttggggatgcagccagatcctcgatcctgatagtccctacattgccctttcttgtgctggcgggaactggatcactgccgaaaccgaagcgccagaagaagccatttccgaccttgcatggaaaaaacaccagatgccagcatggcatttaattaccgctgatggtcggggtattactctggtgaatattggcgtgggaccgtccaatgctaaaaccatctgcgatcatctggcagtgctacgcccggatgtctggttgatgattggtcactgtggcggattacgtgaaagccaggccattggagattatgtccttgcacacgcttatttacgcgatgaccacgttcttgatgcggttctgccgcccgatattcctattccgagcattgctgaagtgcaacgtgcgctttatgacgctaccaagttagtcagcggcaggcctggtgaggaagtcaaacagcggctgcgtacaggtactgtggtaaccacagatgacaggaactgggagttacgttactcagcttctgcacttcgttttaacttaagccgggccgtagcaattgatatggaaagtgcaaccattgccgcgcaaggatatcgtttccgcgtgccatacgggacactactgtgtgtttcagataaaccgttacatggtgagattaagcttcccggccaggctaaccgtttttatgaaggcgctatttccgaacacctgcaaattggcattcgggcgatcgatttgctgcgcgcagaaggcgaccgactgcattcacgtaaattacgaacctttaatgagccgccgttccgataataagttatgaaccttcttatcagaaatagatgtgaaggattaagtaagacatctggcaaatagcctgcaataaacgcgggctgtttgcttccttgggcagatgcgagttttattatcgtcttaatgatttccacatattaaaagcaagtatgctttcaaaacacaattataaaaaatcccgccaacaacattagtttttataaaattaaatataagattatggctttagaatatttttatttctaatagacgagatttttcctgttatgatataatatgctgaattaacacatgttaacgatttaccagtaatgtaaataaattttcgaggagatcattccagtgggacgtaaatgggccaatattgttgctaaaaaaacggctaaagacggtgcaacgtctaaaatttatgcaaaattcggtgtagaaatctatgctgctgccaaacaaggtgaacccgatccagaattaaacacatctttaaaattcgttattgaacgtgcaaagcaggcacaagttccaaagcacgttattgataaagcaattgataaagccaaaggcggtggagatgaaacgttcgtacagggacgttatgaaggctttggtcctaatggctcaatgattattgctgagacattgacttcaaatgttaaccgtacgattgctaacgttcgcacaattttcaataaaaaaggcggcaatatcggagcggcaggttctgtcagctatatgtttgacaatacgggtgtgattgtatttaaaggaacagaccctgaccatatttttgaaattttgcttgaagctgaagttgatgttcgtgatgtaactgaagaagaaggtaatattgttatttatactgaacctactgaccttcataaaggaatcgcggcgctaaaagcagctggaatcactgagttctcaacaacagaattagaaatgattgctcaatctgaagttgagctttccccagaagatttagaaatctttgaagggcttgttgatgcccttgaagatgacgacgatgtacaaaaagtttatcataacgtcgcaaatctctaattatatgttaaagaaatctgtctttatggcagatttctttaatctcatataatccttataaaaatataatgtttaactcgtcatattgcttataaaaaatccccgttcccagagaaataatatttattaaaatggcaggtcttctttttctgattaccgaagacaaagtggcaattacgtatagtttcccgataaagacgcgacagctacatcccgcataaggcatttttctctttatctttgtacggtacttcatggaacagaatttttgaccttgtgaatcgtgatgtctgttggggaggggcaatttgctcactgaagcgtgagactcgattaagcgcacgaaacacagaaatcaaaaacccgaccacttttttacaaagtgaccgggtaaaaataatttttattttttaactgtcctgagactcatagagatgtctcaaaactaaaatttggctcctctgactggactcgaaccagtgacatacggattaacagtccgccgttctaccgactgaactacagaggaatcgtgtgaacggggcgcatattaatggcagtgcatggtgatgtcaaagggtgaaatgcatttttttgtttgtttgctgacaatttcaacaaagtggtgagctttcaatcttattgggtaatgaaccatcgtggtgcataccccccttttatagggcaggtgaatgcgactgctgataaaaagggccaatgacgaatctatcataatctcttatttgacagttggttagcttgcgcatcaacgctaaaatagaactggcaagcatcttgcattctggttgtaagtaatggcggcacttgggccgattcttaaaaaccggaggcaacatgaacttcagacgcctgaaatacttcgtaaaaattgtagatattggtagcctgacccaggctgctgaagtattgcatattgcacaaccagcgctcagccagcaggttgccacactggaaggtgagttaaatcaacagcttttgattcgcacaaaacggggcgttacgccaacaggcgccggaaaaattctctatacccatgcacgggccattttacgtcagtgtgagcaggcccaactggcggtgcataacgttggtcagtcattatcggggcaagtctcgattggctttgcgccaggaaccgctgcgtcatccatcaccatgcccttattacaggcggttcgcgctgaattcccggaggtcgttatctatcttcatgaaaatagtggtgcagtgcttaacgaaaaactgataaatcaccaactcgatatggcggtgatttatgagcattcccctgtggctggggtatccagtcaggctttgctgagagaagatcttttcctggtaggaactcaagattgcccggggcaaagcgttgatgttaatgctattgcgcaaatgaacctttttctccccagtgattacagcgctgttagacttcgtgttgatgaggctttttccctacggcggctcacggcaaaagtcattggtgaaattgagtctattgccacgcttaccgcagcgattgccagcggcatgggcgttgcagtattacctgaatcggctgcgcgttcgttatgtggcgcagtaaatgggtggatgtcacgcattaccactccttcaatgagtctctctttgtccttaaatttacccgccagagcaaacttgtcaccacaggcacaggcagtgaaagagttgttaatgtcagtgattagttctccagtgatggaaaaaaggcagtggcaattggtgagctaagcgttatatcgggatggaataagatgcgggtttttattatttgttatgccgggcattagactttaacaataacgggatatctgaactgcccggagtttaccgtgaatttccaacaactaaagataatccgcgaggctgcacgtcaggattacaacctgacagaggttgcgaatatgctttttacctcacagtcaggcgttagccgtcatattcgggaactggaggatgaacttggcatcgaaatatttgttcgacgaggtaagcgactgctgggcatgactgaaccgggcaaagcattactggtcattgcagaacgcattctgaatgaagccagtaatgttcgtcggctcgcagacctgtttaccaacgatacgtctggcgttctcactattgcaacgacgcatactcaggcacgttatagcttgcctgaggtcattaaagcttttcgcgaacttttcccggaggttcggctggagctaatccagggtacaccacaggaaattgcgacgttgttgcaaaatggcgaagctgatattggtatcgccagcgagcgtttgagtaatgacccgcagctcgtcgccttcccgtggtttcgttggcaccatagtttgcttgttccactcgatcatcccttgacgcaaattacaccgttgacgctggaatcaatagcgaagtggccgttaattacttaccgacaggggattacggggcgctcacgcattgatgacgcatttgcccgcaaaggtttgccggcagatattgtattaagtgcacaggattctgatgtcattaaaacctatgttgctcttgggcttgggatcggattagttgccgaacaatccagcggcgaacaagaggaaaagaatttaatccgcctggatacgcggcatcttttcgatgctaatactgtctggttgggactgaagcgagggcaacttcagcgtaactatgtctggcgctttctggaactttgtaatgcaggactgtcagttgaggatatcaagcgccaggtgatggaaaacagtgaagaggaaattgattatcagatatagcaaaaagcccgctataaaagcgggcttttcagaaatttggctcctctgactggactcgaaccagtgacatacggattaacagtccgccgttctaccgactgaactacagaggaatcgctgttgaggcacatcttaacggcgaaaaatattttgtcaaacccgatttttaaatttcccaactgtttgccgtttctatcaacagtttgttgcatttgcagacaatttgttggcgaaaatctttgcagctttgctgattctccctcatcatttgaaatgtggtttcactttctgcaattaaggtcggctttgaatatctcctctgctttacgccaggttgttcacggcactcgctggcactctaaacgcaagagctacaaagtgttgttctggcgcgagataaccccgcttgctgttcctatcttcatggagaacgcctgtgtcctgttgatgggggtcctgagcacttttctggtcagctggctgggaaaagatgcgatggccggcgtggggttggcggacagcttcaatatggtcattatggctttttttgcagctatcgatcttggtactactgtcgttgtagcatttagtctcggtaagcgagatcgacgacgagcgagggtggcgacgcggcagtcattggtgatcatgacgttgtttgccgtactgttggcaacgctaattcatcattttggcgaacaaattattgatttcgtcgcgggtgatgccacgacagacgttaaagcactggcgttgacttatctggagctgaccgtactcagttatccagcagctgccatcactcttattggtagcggggcacttcgtggtgcagggaatacgaaaataccgctactgattaacggtagcctgaatattcttaatattattattagcggcatattgatttacggccttttctcctggccgggactgggatttgtcggggctgggttgggtttaaccatttctcgttatattggcgcagttgcaattttgtgggtgctggcgattggttttaatcctgcgctaaggatttcgttaaagagctattttaaaccgctgaattttagcattatctgggaagtcatggggattggtattccagcgagtgtcgaatcagtgttatttaccagtggtcggttattaacccaaatgttcgttgccgggatggggaccagcgttattgccggaaattttatcgcgttctcaattgcggctcttatcaacttacccggaagtgcgctcggttctgcttctacgatcattacaggccgaaggttgggggtagggcagatagcgcaagcagagattcagttgcggcatgtgttctggctgtccactcttggattaacggccatcgcctggctaacggctccctttgccggggttatggcatcgttttacacccaggatccacaggttaaacacgtcgttgtgattctgatttggctaaatgctttatttatgcctatttggtccgcctcatgggtgctacccgctggatttaaaggtgctcgtgatgcccgttacgccatgtgggtttcgatgttgagcatgtggggttgtcgggttgtagtcggttatgtgctgggaatcatgcttggctggggtgtggttggcgtctggatgggaatgtttgccgactgggctgtgcgggccgtgctgttttactggcgaatggttactggacgttggctatggaaataccctcgatccgagccgcaaaagtgtgaaaaaaagccagttgtatcggaataaacgacaaaatgcagattatttcagcaaacgatttcaaatttaaaaaacaggctttgacattgtgggtgggcatcgctaatattcgcctcgttctcacgattcctctgtagttcagtcggtagaacggcggactgttaatccgtatgtcactggttcgagtccagtcagaggagccaatttcctgctttcatgcatccttgcgaatccttatgttatttttattcaacaggttagcgtgaaaactcttcccggtgcattttgattttaccctctgcatcgggaaaaattggtggtcaaatctggggtcaggttagttcgataatggagtgacccccatatgtcccttaacgacgcaaaaatccgtagtctcaagcccactgataaaccctttaaagtctccgattcccacggtctgtatctgctggtcaaaccaggcggttcccgtctctggtatcttaaataccgtattaatggcaaagaatcccgtattgcactgggtgcctaccctgccgtctccctgtctgacgcccgccagcagcgcgaaggcatccgtaagatgctggcgctgaacatcaacccggcgcagcaacgtgccgctgaacgcggctcgcgcatgcaggagaaaatgtttaaatccgtggcactggagtggcacagtagcaagaaaaaatggtcgcagaataccgcagatcgcgtgcttgcccgtctgaacagacatgtctttccgaccatcgggcatctaccagttaccgagcttaaatcacgtcatttcattgaattactgaaaggcattgaggaaaagggcttgcttgaagttgcgtcccgctcgcggcaacacctcagcaacattatgcgttatgctgttcatcaggggttaatcgaaatcaacccagctgcaaatcttgacggcgtgacggcttctcccgccagacgacattatcccaccctgccactggagcgccttcctgagctgcttgaacggattgacagttatcaccaaggacgggaactcaccaggcttgcagtcctgctgacgttgcatgtgttcattcgctcaagtgaactgcgctatgctcgttggacagagattaacttcagaaatcggatctggacgatacctgccacacgcgaagcgattgcaggcgtacgttattccagtcgaggtgccaaaatgcgtacaccgcatattgtgcccctttctgagcaggttatctctattctgaaaaggattaaggaaatatctggcgggtatgaactggtgttccccggctatcatgacccctacaagccgatgagtgaaaatactatcaataaggcacttcgccagatgggatacaacacgaaacaagatatctgcggtcatggtttccgggcaatggcgtgtagcgcgctgatggaatccggtttatggtcgcaagatgcagtggagcgtcagatgagtcaccaagagcgcaacactgtgcgtctggcttacattcataaggccgaacatatggaagcccgcatggacatgatgcagtggtggtcggattatctggatatgtgcagtgaaatctgggtgcccccgtacatctggagtcagcaaaacattaatctcgcagtaacctgacttatgaataatcttgtaaagaaccaggccgtatcagcaaacgctgatacggcttttcatccacaggccgtttttcatcttctaagtcgtccaggacatcatggttcttaatacacatgcgttcgcatgtgcttatgttaagtagacttattgtcttacacattttatccgtatcattaaccagaatatgttccggagcagcgggtgatagtgccgccagtccacactcatcgctgcccggaaaaatcatcagtggggaggcaaacggtaagcaccccgctattctgcaagacatttctgcagtttatttaacctccccgaagcatttttataaggcgaggcggtattaaattgaatcatacgacctcgggtccatttattataccaaggtttaccgtaaagctcatcgttactgaatcgttcaatcaaagccacgagttgctgcttattttcctttaaccgtgccaataaaacttcgtactctgtaatatcctcatagtcacggtagaatttctgtgctaaacgccccaattcattccatttaaatccttcctcaggaaaaataatagtttttccttttgcctcttggtcatgccagtgtaacaccagctctccccagccaatcagataggaaaccagattcgctacgctaatcgtagtccccttcgcgtgcccttccaatagaggttcaaaggcgagttggggcgtaatagattctagcttcttatttaataaagaaaaattactattaatagctttaattaactcttcttttgatgatggaacagccatatctattgctccttgtatagttacacaactatttctaccctactatttcgagtgattcaatcgtctggttcacataacctaccacctgttcaaaatgcttatcgacaaaaaaatgatcggcagcaggaaatataatagtccgcgtctttcgtgtggtgaatttttcccatgcaagtaattcatcctgcattaccagattgtcagcatcgccatgaaatagcacgatcggacaggttaatgtgcgcgccttggcctgaaatacatactgctcatagagccgataatcgtttttaatgatgggggtgaaaattgtcattaactctttattacgaaagacatcaaccggagttccgcccagcttgacgatctcttccataaacgcctgatcgggcaaggtatgcagtattacttcatgagaggcccgatcgggtgggcgacagccggaaaaaaacagcgcgcatggcatgtcatgtccatgatcgagaatataatgcaccagttcgaaggccatgatccctccgagactatgcccaaaaatggcgtagtctccacctgtgtagtgtttcacaaattgttgataaaggtcagcgacggcatccaccatcgtaagacacagcggctggcgtattctagttcccctccccgcaggttctaaaggccgcaaagtaatattgtccgacagcacgctacgccatttataatacatggcggcagaaccacctgaatatggcaaacaatacaaactgatattactcatcgtcccactccttgttgtgtaatagaattcgtttaatttgatgatttaatgtcagaacgaaagctaacaggataattccgaacggtatcgccaacacgctcgatggaccccataccaagataaaacgccagtcaagtcctggagatagtatacccggtgcgacatagagcatggcggccacgagcccaggaaccgccaaggcgatgatatagtcacgtacgcgtaaacgtaacctctgctgttttccagggccatgcgccgttgcgcgataaacacggaaagcaccgcgcactacaaccaccgccccccaaaaacacagcaacaacgtgaggtagacgaaaagggtatcggtggctgtaattgcatcaccagcgccgtcagcatatttgccaatgcgcagataattatcgatatccgcgcaaagctgtagtatcagattcgaattcatatttgccagcgcaacaatgccaatctgctgatccggtcgcaacgcaatgcaagaagaaaagtttggattctgcccaccgtgactgatgtaagggccttgattctggtcgataaaccaaccgctggcatagaggatacgattgtctgcggcaagcggaacatcactattaccacgccaactgttactcatcgcctcacgcagcgttgccggcaaagcctttctgtgcaaccaggcgtctatccatatttccatatcaggcagagtgctatggatataggcggcaggaacatggttccgggccagaggcgcatgaaacagaacgggtttgccgaatcccagtttatagccgcttgccttgttgacaataatctcatcccccttaactgccacagtcgccgacatgcccagcggctgcgtgagtcgttccgcaatgacctctgtaaaggtttttcccgtcacattttcaatcaccgcgcccaacacatcataattggcggaggcatagctaaacttcgcacccggcgcaaacagcagattctcgttgcgcagttgctgtgccacagcgctcccaggcatagggttttccagccgagccagtgttgaaaaaggcaatcctgatgtatgataaaggaaatcagccacggtcagggaagcaggttttccctgataattcaagcgcatttccggcagataggtaatgatatcatccccttgccggagtctgccttcctgaatcagtatttgcaccacaagtccggtaaacgccttactcatcgatcccagctcgtaaactgtgtctagagtattcgctttctgactagccacatcggcaacaccgtagacaaatcgctgacgtacccccttaatggtcacacttacggaaagggctgggaccttggcctcctgcatccgttggtgaattaatgtcgacaggcgctcatcttgcgccccgataggctcatgttcttgcgccaaagcgcacatagcggaaataaagagcagcatacagcacaggagatgatataatgttttaatgctaacgtgttccattattgtcatcctgtgaacacctcataaaataccatcaacacattcggagataaattcactgtgctcacggatagcgggtctggcataaatatcggcggcagtcagtccgattttataaatgtggttacagctgtcgacgaaagagataacgtgcatcgaggtcgctccgtattcgaaaataaccgcgtgttcgtcataatgatcgatgcataacaatgaacgccaggttttctccacaaagtcgctgaccgacaaataactcactggtaacatagcgttctctctcgcatcactggactgaatttcataccggacgcgatcaaacgaataaccgggtaagcctatagtctgcacggctggcatttccggtaaacaaatagtcactcctcgttgccaaagagtgcccaacagcggcaggatgtcctcaggcgtatccgtattcagcatgggggaaaatactgtttgcccaacccactgcgcatgctggtgatacaatatggaaaacgtccccgcgcgaccgatttccagcatcagcgttccctccgtcaccgccagattagccaatatttcgctcagttcactgttgccggccagcgtctgctccggtgtcgtttcagccacaatcacctgctgaacagcgttttccagtgagatgatgcgcgcaacatactgcgctgctgcagcccccgtcaggtaaccgatgtgctgcacaggcgagatactttgttcgatcagccattcactaagactcacctgctggataaactgacgcaatgctggcgtccaatcggctggttcgcagatttgtgcaacatcctgagacaggcgctggtgccgctggcgcaagttaggttgacaagccagcaaatgcgtcagggcactctccagcttatcgtcccggtccggatataggaacaccaaggtagtttccatattgataggggtaaaagacatgtcagcatcccgcagtttcgccaaacttgcacgcaacgctaccacactgtctgccgccagcgcacagcgatacgggaaatgtgcccggcgttgcgcgagagtataggcgatacgatctttatctgcttccgcataggtcgccagagcgtgataatgagcatccaactgttgtctaagggctaatggcgttttggcgctgaagaaaaacaggcggcgctcattttcttgcaccgcttgcgcaggcgtctcgcaccagttttgcagaaccaaatgagcattggtccctcccagcccaaacgaactaacggtggcatggatccttttcgtttgtgggacagaagtcactacatcactgagataaaatggcgaggctggctgcaacagttttttatgtttatttactaggttgatctgcgggggaactaaaccagtatatagcgtcagtgcggttttcattaagctgacgataccggaagcgactcccaggtgacccaagttggcttttaccgcacccaattgaatgctgtgcggcgcacatgccggtgcgaaaacccggtgcagagcttcaagctcaatctcatcacccaacggggtaccggtaccgtgcgtttcgatcagtgcgatatcagtcggtacgacttctgcggcggcaagcgccgtattgatcgcttctacctgtccttctacgctgggggcgacaaaccccagccgacgcccgccgtcgttatttaccgcacctcctttaatcaccgcatacactctgtcttggtcgcgtagtgcatcctcaagacgttttagcaccacaactcccgcaccgctgctgtataccgtgccggtcgcctcagcgctaaacggggcgcagtgtccgtcttgcgataccagcttatcaccttgcggactgtagccgtgcgcctgtaaaaaacccaaggtgaccccacctgccaacgcaacatcggcttgaaaagtcaataacccctcgcatgctaaatatgctgccaccaacgaactggaacaggcggtctgtacactcacagcgggtccggtaaaccccaacttgtaggcaacctgagcacacaagtaatccttttcgttaccaatctgcgcctgaagataatggtgatcgccgctcatcttcaggtatggatagacgcgatcgataaaatagttattggcgtaggtcgccccatagacgccgactcgcttaagttgcgtgggaatatagcccgcatgctcaagagcgttgtagcagcattcaagaaatattcgttgttgcggatccatcaacagggcttcgccaggcggaatattgaaaaatgcagcatcgaagtcatagggagcggtgattatattgcgcagcctaatccaagggttcccattatcgtcttctgtgcatgtcggttgagtgaactcctcacccgccagcaacttatcccaccactcgggcaccgattccgcaccggaaaaacgcccgctcatgccaataatggcaatatccagtgagccacaggtaaaatcatcctttgccattgttgtattccttaagggttggcatcgtgtttatagtgtccacaaagtcggcgcgcccgtcagcgtggcgctgtgttggcacagccaggcatccagatcagtgaggctgttcttgtagcgcgccagcaggagttgcacatcattcagcgcaatgcgcgtgggatcgaaacggcagtggaaggagagaccatcagctgccgagcgcgcaatattaaactccagcacgcagccgagcgcgttttcaggcgcggtatagatatcactattaaagtgatcaatatgaaaatagcggagtgaaggttgcgcctgcacaccgatgtaattcattcggatcccttgcgcaagagagtcttccggtgcatgccgcatttgcagcagaccgtaatctcccccaccatgcgtgcgttttgccaaatcggaagcgatcgcagataacagtgtcgccatatcgccatgcagagggatcgcccaaggataaaatagagtaaaccacccgaccgtatccgcaacgtcaggctcatcgggccagcagccgcgtcccatgccttccatctcgatgcgacaccaaggctcttcgctgtagtaacgcagcaccagcgccaatgccgttagcacataggtttcggcgctgtacgcggtattaccactggattcaaacaacctcctgacgcaaggatggcgaaagtcttcacgccaagcgcgcgtacgaggtaatgagtcatctggcaatgacacgggtgggaaatgcagcggtagcgtttgacatactgtgcgccagctttcgtgtgtggcggaatctaccgttttgctcgccagatagtcattccagcgatgcagtccgctgttgctggtgccattgacagtgctgacggcgtccagcgtgctgaggattaaataccaagagtgcatatcgacgcacaagtgatgggcacagagtaccagcgtgctagacgcaggctgcggggcgtgtaacagagctgccgtaaagactcgaccatttgtcacgtcaagcatgctattgcactgagcgatcacctctgccaacgtccactgcgccgtcgaatattccgtgagcacctcgttgggataacacacattagggtcgcatactagcaaccgcccctcagcgtccagcgcactgtgcaaagctggctgctgctggattaatgtatgcagcctgttgtgtaactgctcgagcgggcagcccggcaacactttcagcacaatgacatggttataaacattgggcactggcaacgccaactgcgtaaaccaacgcaatgcgggtagatcgatacgggtgttatgagcatactgcgcgagctgtgacaccgttgtatgactagcgagaaactcacagatggcgttcactgttccacactccatcacctgcaccgctgacatcgtccagccgtggtgcctgagctgcgctgcaatctggatactcttgatggagtccaaccccaagacataaagattttcgttatcatcaaactcagtttgctccagcgccccttccacacatacccgaactgaatgccttatcgccgcatctcccagccgctcgctacccgatgcaggcgcggtgtttcggaccgttgcgaccatctgacgcacgtccaccttgccattgtgcgacagcggcagttgggcgatagcacagcactgcttgggttgcatgtaggtgggtaattgctgacgcagatgttgcattacggtagctacatcaacagatgacggtgtcacgcaggctagcaacccgctgtgctgcccctgcacatcatcaatcaccgccaccgccgcactttctacctgaggtgcgctcaacaacgcttgttcgatttcgcacagctcaatacgatagccattaattttgacctgatcgtctttacgtccctgataaaccagcgtattaggagcgatggcgtagccaatatcaccgctgcgatagccaatcatcaccccattggtatctttaaggtaggcggcggccgtttgttgcggcgcatcgatatagccctgcgtcactgacgcgccataaatcaccaattcaccagtttcgccttccggtaccggacagccccaaggggagcaaattgctacctggcaaccgtcgatcgccataccgatgggcaatgaaggcagcgtttcttgcccggtgtagcgatagatcatgcaaccaacggtggcctctgtcggcccatattcgttatagatcacggcctgaggaaagagagcagccgccttacgcgccagatcccgcttgaaatcctccccgccaaccaccaaggtacgaatctgctcactgcttatgccagccgcacacaacaaccgcaggtgtgcaggcgtcagtttgatcactgtgttgggctgatcaaccacggccatgcgcagcaatgtttcgctctcggcgtgccgacaaacgctgatgctagcgcccacacataagggggcgaacagcgtagtgatggtcaaatcgaaggacagcgaagagtagagcgcagcccggtcctgcgctgtaaagtaacgttcggcggcgaaatggagatagttagccagattgccatgagagacttgcacgcccttaggctcgccggtcgatccggaggtaaacagcacatatgccagatcctgcggttcaatagctggccaaggttctctagcaagcgccgaagtggctaaggcctggagcaagctggacgcgggaaacgccagcgcctgcgtcaattcatgcatcgccggatcgtaaaggatatgcgctacctgcgctttacgacacatggcgtaaaggcgggtcgttggcaacgcgggatttagcggcagaaatgccgcgccgcagcgcaaaataccataaataaccatcaccgtttgagcgctatgctcagcgataatcccaaccacttgaccgcgtccgatcccctgttggcgcagataacgcgcaacccgctcaacagcgtcatccaactgccgataagtcaaagactgttcattatcaattagtgctgtgcgatcaccatgctccacaacttgcgctgcaaatcgggaagtaaatgagggtttgagtgagccacatgccaatgcgacgtgcggcgcaggatagacttcgagatcgcctagacgagcgtcaggttgccgatccaatgcagtgactaaatccaacagcccatttttcatcgctgtcagttggtgcggagtgaaagcgctacgcagcgcctccagactcaacctaaggctttctttatgattattaacagtttgcaaaacaatctgtagcttataggactgctcgccgctgtagtaactctccacgcgttgcgcggcacctgcaatgtggcgttcataggtaaagttataataattaacgcaataatcgaacgcccgcaacttccctcccccctgttccgccaaatcctggttgaataaggtaatgggatatttgctgtgtttaaaaccgcgtttcagttcgcgctggaaaaaggccacccgttcacagaatcgttccgtgcgcaccagtcgataggccagcggcaattgattagtaaacatgccaaagcaacgccgcgcctcgcgagtatgccgattggctaacggcacgcctattacgcctttttcctccccccatactctggcgcgatagagagcgaagagtgcaataaacagcgtattaagcgtacagccataacgattacacaacctgtagagacggttaatcatggctggctcaagccaagtggaacaactgatgccctcagtagtaacgatgggggaactgtctggaaagcagtcgcggtattcgtcgatatagtcacgccaccagccacgatcaacggcaaagcgcgttgacgcctgataagattgctgctgcgccagaaatgcgctataggctggtgacgcatcatctggtacgtcctgctgttcgtatgctcgcttgacatggtttgacaacaacgccattgaccaaccatcagcaatgccgtgatgggctttaaataaataaccgctgtattgttcaccgcacgtaaaggtgacaaactcgaacaaatcgtgcgccagcagggtaaagggctgccggaaccactcatcaacaaatgtttcgatcgccgctgggcgtaggttctccttgtcataatctggggaaaaagtcaaatggcggatatcgcgccagtgataaggctgcacttggctgaccacttcactctcctctcccatcacaaaccacatacgcaacgcatcaaattgccgaatggcggactggatggccgcgtgtagtcggggcagatcgacaattccctcaatggtgaccacaccaccaatgatgtttacggcactgtaaggatacagttgatcaatgatgtggcactgttcctgtggccacgacaacggattgcccgacatcatggtgccacctccatatccaagtgttgggagcgcaccgcctcctgattccatcgcagcagacgaggtgaaagacgcagcagacgccacgccaacaacgcagccacaaaagtgccgctcatcgccccaaaatagacgccggtaatacgcatctctaacacaatcgccagcaggtatacgacagggacagatataaacacgtgacgcatcagcgtcaacaacaccgaataccaaggcttaccaatggcctgataatattcacttgctaacaggctgatagcgacaaagggtagtgccagtgccatgatacgggtttgcagtaccgcatagtcactcacggcaacaacacgagtaaacaggggatacatccagggtgccagtacaatatgcataacggctaacaccagcacaatagagaaggccagcgcgacggcggcccaataggcattcagcgtgcgggtgacatttccgtgtccccagttttgccccaccacagtcagcaacgcggtcgcgatagccagcatcggcgtgatgatgaaatagtcgatgcgaccagtgagcgtaaacgctgccatcgcgtttacgtccagcctgacgataaaaaaattataaatcactatgccgaccgcaatgatcagttgcatcagcatctgcgccatgccgacggagagaaactctcggtagattttccaggagaatgggcgtaacgcgatgcgtatactcaacccgatatgtaatcccatcaatgtgtagatgaaataggcgaccatactcagttgcgccagaaacgacgccaatgccacccctttcacaccaaaatcgaatacaaagatcatgattggatcgagcataatatttaccaacgcccccaacaatgaggccttcatgatgaccatgatcttacccgcgccttgaaacagccccatcatgacgccaatcaacatgatgctgaacacggtcagcagcgaataataatagaactccgttgcgtagccgatgatgctcttcgtggcccccagtgagcgcaatagcggctgggcataaacatagccaagtacggtgatcacgatcgcaaagaatagcgcgatgatgataccgaccgacaaaatccgctgtgcacgatccaaccgctgcatgccgatggcgcgggacagcaaagatcccataccgatttgaatgccgttggcgatggcaaataaccccattccaacggggaaaaccagccccacaccggcaatgatgccgctgttggtgacatcaatgtggctcagccaaaaaatatcggcgatggcataggtcacctgcgttaacataccgacaaacatcggcaacgccatgcgcaggagtaatttatacagcgagccgtcaaacatacccgccaccgtgaacagctcatcgttcggcgtgccgttgtctggctcaagcttattcaccgtcatacctgctccttattcattaaatgcgccgcacctttattggcgctgtcaccgatatccgcctctagtacccttccggtaccgtgaatccgccactgatgctttcgcagaactcagcaaagttaatcgtcacatcatcgtgaaaatgcccggaaatgatctgtatgccgcacggaagctcatccatcgttttcgccaatgggtaaacggtggcaggcaaaccaaaaaccgttgctaacatgttccagaacaaatgttcgttgtaatcttgcggttcgccattgacgataagcttgcgcttacgcaccggctgctgcatgtgcgcaaacgccagcaccgggctgacaggtgtcaacaacacgtcataacgcgcgaaaagggtttctatcacccggctgtattcgtggcggagtttgtctgtattccgctgttcgccactgtctttcagcatgccctggtaatagctcgttatcccctcaggcacatccgccagcttgcccacaagcctgaagcccagcgcagccagcccggctgtaagacgctggcgtccattgagcgccgtacttaccagccgaccactgagtttgactgctatatcaaacagtgcgtcgggatcgatatcggcgggcatagcatcatcaacctccacgccaggctgtgcgcgtaacttgtcgataaacgattgaaaacgctgtgcgatctgttgatctatctcatggtggggcgcactaaaccacgtgcacacgcggtagtttgctttggcctgataacggctaaaatcgggaatacgcggcggttccacccagaatgtgctcaatgcgcgcatcatcagacgcagatccgccgcgctgcgcgccatggggcccgccgtcgagagatccggctcatcagtcgcttgcggaccaccaccgggcacatgtcctctgaccgacatcaaccccaagctacaacgatgggcatagacacctgtgtagtgtgcgggaatgcgcagtgagccaaacaaatcgctgccaaattccacgggggtgaaatccgccgccaccgccaccgccgctcctccggacgatccgccgggtgaacgttgcctatcccacaggttatgggtggtgccatacagatcgttataggtttgccaatcggcagtcatcatcggcacattggtttttcccatcaggatcgccccggcagcgcgtaagcgtgcgatggaaggagcatcctgcgtcgcccggttatctttcagataatgggcaccggacgtggttaaccacccttgcacgtcaaacgactccttaacagtacaaggtaatccgtgcaacacgccccttgcgcgcccctccagtcgctcacgatcggcgcgcgcggcggcctccaacgccaacgcatagtgctgctgcaccaccgcattcaacggcttgttaaactgcgccatacgtgaaaaatagtgattcaccaacgccactgaggtggtttctccggacgccaactgtgccaacagtgtccctgcgctacgatagctctgctcactcatcgcccttttctccctgttgggcacgtttacgccgcaacgccagattctcgcgcgcagcgctgacctgcgaaacctcagcctgcgctaatacgatatcgtgggcggcgggtagattgtgcagttgctcatcaaggtaacgcgccacatccgcgatggttggcagacggaacagatcgacaatgggaatctcctgcccgataatcgcctcaagtgcctgctgaatacgcaccaattctatagaactgccccccagcgagaagaaatcgtcttcggccgacacgtggctcacgccgagtacctcctgccagagcgccaccagccgctgttgtaacgcactgtccacctggattggacccacgccgtcacgctggtgggcaatttgttcgccctgcagctgtaatttttgccgatctagcttgccgttagcggttaacggaaaatcggtcgctaacatcagatcactcggcaccatatagtcaggcagttgctgacgcaggccgcgcagcatggcatctttgtagctctgcatgtccagcggcgcagcggtttccttcggtttctcataggtggagaaatcgcgcagcaatgctgcagcacttgccgcctcttgccctatcgcgccccccacggtgcaatggacatagcgatgatgtggcgacaattgaaaatgcgatgccacagcggaaaagtctgccatcccaagttggcacagccccaatccgtagcgcggcgcatcttcttccagtaaatggcagagagtacctgcttccatcaccgagaagtgccaagctgcctcttgcccatagaatggcgagatcaccgccatatcagccaccataaacagcgtgaatgccgcccgatcggcaatagactgattaggtccggcatgaaaaccactgttcagctcgacttctggtgctaccggcataagacagctctgtcgcgggtcgaagtagtaaataccggatactccctcttcgatcttgtctggatgcaggtacacgtaggtttgcaccgggtatagccccccggcggacgcataggcatacttggcaaaaggtagaccgggtagacgcatctgccccaagcccgacagcaattgccccaactgtgccagcgtggttttttgcgcgctgaaatgacgatagctgcggcgtttgatgtaacgtgtgctatccgccggtgccgtcagtgcaatgcccagaccatccagcgcgcgaatatgtggctccttgagtttgaacgctagacgctgtgccggattcacaataataccctgcgccagtgccgccgcctccgcttccttagcttgcaatgcctgcgcctggtggcgatcgtgcagtttggcaaaagcgaccagccgacgatgttgagaattacccactgccaccaccactgactgctccacatcgggatgtcgcgcaatgcagcgctcgatttcccccagttcgatacggtaaccattcaccttcacttgggtatcgttgcgccccaaaaaggcgacttgcccgtcagcaaagtagcgcccgcgatccccagtgcggtaaattcgctcaccactcgcttcgcgccagacaaagctcgccgccgttttctctgcgtcgttcaggtagccttgtgccagccccatcccgccaatgcaaatctctccttccaccccgaccggacattcctccagttgcgcatttagcacgtatactggctggttgcgcaggccccgaccgtagggaatactggtccacgtcgattccacctcacctatcgggtagtagaccgaccagatggcgcactcggtcgctccacccagactgatgatgtccatcgtttcattgagccgctcgcgcatctgctccggtaacgttagcgggatccagtcgccgctcaacagtgccagacgcaacgtcggataactcatccgatcgccgctgtggtattcgcacagcatctgcatcagtgcgggcactgcattccagacgcttacatgaccgtgtgccataactgtctgccaatgacgcggatctttttcccgtcctgcttccggcagtaccagcgctgcacccaccataaaaggcgcaaaggcatcgtaaaccgacaggtcaaagctcaatgatgacagcccgaacaccctatcctgcgcattgaggccaaagcgttcgttgatgtcttccagcgtgttcatggccgcacggtggtcgatcatcactcctttcggggtaccggtggagccggaagtgaaaatgatataggccagatccgtgacatccccagccacttcaggcaacggcgcagcaggcgtgtccagcattccgtcgtcgatgatcagcacgggcagcgacggctccaattgcgtgagacccggctgcgttacttgtacccgcacctcgcccaccgtcagcaaaagctggcgacgctgtggcggtagcaccggatccactggcagatagaccgcacccagtcgtaaaatgccgtgtacggcggcaatctgctgccagcctttttccatcaccaccgccacgcggtcgccatgctgcacgcccagcgctaacagggcgcgggccacatgatccgccgccgtcgacagttggcgataggtcaattcacggataggactgatcagcgcagtttcctgtggcgtcagtgctgcctgacgcagtaacccatggtgcaacaaggccgtaggtgcaggagcctgcgtgaccggtgcactaacggtgggcagcgccagcacatcttgagtctcatgccagagctgtggtcgctgggctagggcgtgcaggagttggcaataacactggaacatctgatccattagcgccggttcaaacaattgttccaccacgtcccaattaaagtgcaattccccgttacgctccattacctgatgatcgagccacacctgcggtgtctgtgaaatactgtacagatcatcctgcggttggttgaacagcgtatcatccgtttcccagctcgcctcatattgattgagcaagctggtgaacacgataggaatcaccgatttcgccggatcgcggtgagtttgtaccagcagtcgagagacctggataccgccaaacaagcggttatccaaatcgcgccacagttgagagtggatcacgtttgcccgcgcctgcaaggtttctccctgcgacatatcaatctccagcaacgtcagtgcagtaaaatcgccaattaagtgattgatatctgcgtgcaacggcagacgattaaacagcgtcaggttaaggctaaagtgcggcgaggaactaaagcgcgccaacacctgagcaaaccccgtgagcagcagtgtagtaggcgtgatactcatctgacccgcctgcgttttcaagcgctgccagatagcacgagatagacaatagctacggcgcacgaatgtggggttttccagcttcgtggggtcggtacgcagcggcaatcgtggccccggcggcagagtttcgatgcgggcgcgccagtagtcacgtgcccgttcaaactgcggcgttttctcgtaggattttaaggtcagcacatagtcgcggaaactgtacgtcaatgtaggcaatgccgcctgcggatggcggtagtgataagctagttcccgaatgaacaactccagactccatgcatcggctatcagcaggtcgatagatacatgtagccgggctttttgctgcggatcaaccacgacctccatctgaaacagaggccagcgactacaatcaatcatctgatgtgagagggtgtcacgcagctcacggcaacgctgttgaaacgcatcctcgcactgggtggtatagaaggcaacgtggtattccggcacgtttggcaatatctgctgcataccgtcatcgttgacaattgcacgcaacatgctgtgccgcgcaatcaccgcattgagcgcgcggttgaacgctgtttcatctagcccctgtagttcatattccacatagatatgggtggaaatattgcccaatcccaaggattttcgccgcccaacccaataggcctgttgcacgtcagtcagcggaaaaggtaggtgctgctggtcaggggcaaagaccgtatcaggcaatgctgaaaccgctgtctcactgccgccttgttcgagcagatagcaacttaatccctcgatggtgggatcggcaaagaatgcgcttagcgtacaggtgatgccgtaacgttgctgaatatcatataaaatggttgacgctaacagcgaatgcccacccagttcgaagaagctggcgtggtgatcatcaatgctgacaccaagcgtgcgttcccatatctccgtcaccactgcaataatatcggattttgttgcgcgggataagagattattcgacgattcgtgggagaacgtggcaggccgtacggcctcgacccaatagcgctgcggtgtaaaaacggtccccggcagggcgatgcgttgactgcccaacatacgctccgccgcatccacccagcgccaatctaggctgacgccagccaaccataactgccctaacgcctctagcgcggtgcgattggcatcactcgccgcgtcgtccagcatcaaagagcagacatcgggctgcaagaggggattcgtcggcacatcatcaaacggttggcccgcattcaacctgtgccatgcttgctctagtgtgcagtctcctcgtagtacggcggcagcatagccaccatcaccgtcgccgcatagcaccacattcaacgtttcccgttcgtcaatcaacgcgatcagcgcatactggctgataaacgtccgttgcgcagggaagagatcttgcagacaggctggttcgagcggaaaatgctcgagcagttgtcccaccgcctgtgacaacacctcagagcacgccagccagtcactaagcgtctcgagtgcaacaacgaaacggtgccccaatctccagtagatcgtgcaacccgtggttgcctccaccatcggtgcgtcgcggagttgtcgggctagctgggtgcaattctctgcgatgacacacttacgtaccggggcggagaaacgcccgtgacgcagggtgtaagccacgtcctgtaagcgtatctctggatgtgcggccagtttcgccagcagggcgttttgcatctgttccagggcattgtggttttttgccgagagtacaacgacacaaggccccatctgctgcgccctcgcctgcggcgtcgataacggcgcttgtaccaccagatgtgcgttggtgccgcccaatccgaacgcactcacaccagcggtgcgtggcgtggtgccctccggccaaggcgttaaacgggacaccacttcaaacgggctgtcctccaaccccagttgcggattagcccgttgaaaattcagcgtagggtaaaacacccggttagtaagactcagcaccgtttttatgagactggtgatgccagatgccatttctacgtgacccacgttaggtttcacagcccccagacgccacggtgtcgcattcggcgctggcgtcccaaacacacgtttgatggccgcgaattcgatagcgtcacccaacggcgtgccgctgccatgcagttctagatactgaatttgctgcggcgtcacctccgccaagctatgcgcctcaatcatcacagcttcctgaccatcaacacccggcacggtataaccactgcgcgcaccgccatcattgttgatggcgcttcccttgatgacggcaaggatgttatccccttgcacctgcgcgtctgtagcccgtttgagcagcaccatgcccaaaccactgctgtagaccgtaccgctcgcctgcgcatcaaaagtatgaatcaggccatcctctgcttgcagcccatcaccgtgcgattcatagctgcgctgctcctccatgcgaaacgtgacgccacccgctagcgccatatcgcactgaccgctcagcagcccttcgcaggccagatgcactgccaccagcgaggtggcacaactggcctgaaccgtcacgcaagggccggtaatattcaggcggtaagccagttgggacgtcaaatgatctttgtcattgccgaccatgatttggagaccaccgagttgtgcaagcttgtctgggttgttcatcaggtgagtaagcaaatagaagctggtactcacgcccgcatataggccgacgcgcgcatcgtgctgcttcgggttgtaaccgctttgttcaaacatctcccaagcacaggtcagaaatacgcgctgctgtggatccatgatttctgcttctgcacggctgtagccaaaaaagttggcatcgaactccgccatgtgctcatagacgttgttcagcgtaatgtgattgtggccgttgctcggggtcactttggggtccaaaatgttgcatccggtgcgaagcaccgtttcgaatgccgcaacgctgtgcacgccggggtaccggcagttcatgccaacaatggcaatatcgctttcactgtaagtcattagtttttccttaacgctgacgctggtgacgacgtacaagtcgttgctgggcgcgggatcgggaagcatcacgctgctgtgtttgattcaccgcccgtgcattgtcctgcatagcctgcaaataaccggcaattcttttcacggtggttaagcgaaatagctcagcaataggtaccgtaaccttaaaaatctcctcaatacggcgatgcaacagcacgatctggattgagccgccccccgcttcaaaaaagttgtcattcagtccgatctgttctcgttgtagtacctcgcaccagagagcggccacctgctgttcatagggcgaggcgtgcgcgagggccctcgacttctgtgatgtagattgcgacatacgttggataacctcttgaaccattgccgcctgatcaattttgccgttgcctgtcatcggcagcaccttgagaagaaagaaatgttggggcagcaggtaatacggcaactgcacggctaactgagcacgaacacgcgctaacagggcgtcagtatcgtcaggatgcaggttttctgcggcagtgataaaggcatacagctgtccctggtggcacaccacggcggcactccctacgctgtcgagctgttcaaggtggcttttgacttcccccagttcgatacggtaaccattcaccttcacttgggtatcgttgcgccccaaaaaggcgacttgcccgtcagcaaagtagcgcccgcgatccccagtgcggtaaattcgctcaccactcgcttcgcgccagacaaagctcgccgccgttttctctgcgtcgttcaggtagccttgtgccagccccatcccgccaatgcaaatctctccttccaccccgaccggacattcctccagttgcgcatttagcacgtatactggctggttgcgcaggccccgaccgtagggaatactggtccacgtcgattccacctcacctatcgggtagtagaccgaccagatggcgcactcggtcgctccacccagactgatgatgtccatcgtttcattgagccgctcgcgcatctgctccggtaacgttagcgggatccagtcgccgctcaacagtgccagacgcaacgtcggataactcatccgatcgccgctgtggtattcgcacagcatctgcatcagtgcgggcactgcattccagacgcttacatgaccgtgtgccataactgtctgccaatgacgcggatctttttcccgtcctgcttccggcagtaccagcgctgcacccaccataaaaggcgcaaaggcatcgtaaaccgacaggtcaaagctcaatgatgacagcccgaacaccctatcctgcgcattgaggccaaagcgttcgttgatgtcttccagcgtgttcatggccgcacggtggtcgatcatcactcctttcggggtaccggtggagccggaagtgaaaatgatataggccagatccgtgacatccccagccacttcaggcaacggcgcagcaggcgtgtccagcattccgtcgtcgatgatcagcacgggcagcgacggctccaattgcgtgagacccggctgcgttacttgtacccgcacctcgcccaccgtcagcaaaagctggcgacgctgtggcggtagcaccggatccactggcagatagaccgcacccagtcgtaaaatgccgtgtacggcggcaatctgctgccagcctttttccatcaccaccgccacgcggtcgccatgctgcacgcccagcgctaacagggcgcgggccacatgatccgccgccgtcgacagttggcgataggtcaattcacggataggactgatcagcgcagtttcctgtggcgtcagtgctgcctgacgcagtaatccatggtgcaacaaggccgtaggtgcaggagcctgcgtgaccggtgcactaacggtgggcagcgccagagaactatttaccccccaccaactttgcggcatggcaaccagcgcctgcagcgcatgacaataagcaccaaacatctgatccagcagcgtggtatcaaacagttgctcgaccgcgtcccagttgaaatgcaactccccagccaactcgatcacctggtgatcgagccacacctgcggtgtttgggtaatattggcgtccggacacagagtaaaacgggttgtgtcccgagggtcttgcgcagtcgtctccccgtcgatatccaacatactagtgaataccaccggcatcggcgcatggaaacgaccgctatggatcagcgcctcgctggcgcggatcccactgaaacgacgatgttcgagatcttcccacagttgcacctgaatacgctgagcgttgtgggcataagagtgctggctgtcgtaacaaacattcagcaagctgacagcggtaaaatcaccaataactgcctctgcgttggggtaaccctgcgggcggttgaacaacgtcagattgagcgtaaacgtcgggctaaggctccaacgtgccagcacttggctaaagactgtcaacaacaatgccgtcttggtgatacgtgtgcgttgggccagcgcgctcagcactccccagttgtgggctgacagccgatgacggcgacgtacgaacctgatcgcagacagttgcgccaaatcgccctgtacgggcagcgttggtgggccatacagctgcggcagcgcccgttgccaataggcctgatcgcgtgcataggcttcactcgcctgctctaccaacagcgcctgcacgtagtcacgaaaagagaacggtagcaacggcagtgacacatggggctcacggtacagcatcatcaactcctgctgtagcgtgcgcatactcagagcatcggcaatcagcagatcgagactgaaatgcaagcggccatgttgcgccgtgcaagccgaataactgaaatcaaacagcggccaacgatctgcgggatgcacatgatgcgacagccgatcgcggatcgccatcaaggcatcgtttcgtgcgttaggggacaaagcactcagatcgcgctgctctaactgatacgccggcacttgcgccagaatctgctgagtaccgtcggggagtacccgcgcacgtagcatttcatggcgagcgatcagcgcattcaccgcatgggtaaaacgcgtaacattaaagtgttctacgtcaaattcatggtagatgtgggtcgcgatcgaggtagcacccgtctgtcgtccaagccagtaggcgcgctgaacatccgtcaatgggaacggttgatgacgatgctcagggtcgtgcactatcacccagtcatcctgagacgcggcagcgtccgtgatagattgctgtgcaatacgcgcactcagtgcccgtagtgtggagtagtggaaaatgtccttcagggtcaaggcgcagtgaaaagtgcggttgatctctgctaccaacgttaccgccaacagcgaatgtccccccaagcgaaagaaatcgcactcaggatcgacgttttttatcggcaaatagcgcatccacagcgccagcaacatctgttccgtgtcgctcagcgcttgcgtctgcggcgacacaagggagctatcggcaacgaaattttccgctaaccgcttacgatcgattttaccgttgtcagtgttcgggaagtcggccaccctctgccacagcgttggcaccatatagtctggcagttgctgccgaagctcgtttttcagttgctcgaatagcgagggaggctcactggtgatgatgaatgctgccagtgctttgtgtaacggtgctctttcaatacaggccaccaccgcggcgtccacatgcggatgccgtgccaacgtccgttcaatttcgcctaactcaatacgataaccgcgcagtttgatctggctatctttgcgcccaacaaaaaacaactgcccctgcgcatcactcctgaccagatcgccagtgcggaacatcctgccaccggggacccctggttctgacaagaagaactgtgcgttcaactcaggctgcccatcatacccttgcgccacaccatccccggcgatgtaaagctcgccgtcaacgccttgcggcactggatggccctcattgtccagaatgtatatacgggtattggcaatgggagcgccgagggtgatgttttccgcttgggttatctgcgatttcagcgaccaaatggttgtttcggtgggaccgtagaggttccacaatgaaccacaacagcgcaacagttcttccgccactttcgttggcagcgcttcaccgcctgccagcacacatagttccgggtcgccacgccaacccgccatcaacagcccgtgccagaacgagggcgtcgcctgcatcagcgttggtcgatagtcggcaatcagcggaatcatacggaagctgtctgcggcgcgttccgcctctgtcagatagagactcgcaccggagatcagcggcaacagatactccaagaatgagatatcaaatgttggcgtcgtcaccgagagcagccggtcttgcgagccaaccgcaaaggtacgctgcatatccaacaacaagttcagcaacccgcggtgaacaacgcacacgcctttaggttcaccggtactgccggaggtaaacaacaggtaggcctgcatatccggcaacagcgcgcaaggtgtagaataccggatcgcattcgacatgtcctgcatcaattccggcaacgacagttgtacaatttcaccccactctcccggctgacggaccaccagacagaccaaacgcgcgcgttgcataaggcgttgcaaacgcgcggcaggctgatgaatatcgaacggcacgtagcacgcccccacaaaccacgtcgccaacatggttgcaatcacatccctgtgacgtggcaacagcacgccaatacgatcgcccggttgtatgccatgcgctcgaaaacgcatcgcgatgaactgcacacgcgcccagagctcagcgtaggtcagtgtgccgtcatgctgctgtattgccagttgctttgggtgctgcacacagcgctgttcaatgatacgcagcacatcctgcggcccgagccacgggacgttagtggcgttgagcggatcacgccgcggcgttgcggtctccggtgcatgcagagggatcgcccctatcggggtctccagtgatgatgtcaacgataagcagtgctgacgcagcgcctcggcaatctgcttcaccacatcagcatcgtataaccccaaatcgtactcaaaggagacgtcgaacgtggcgtcgttttggaacacctcgactgtcatgtcgtatttgacggtctgattgtgatacgtcacctgctcccaatacgcaccagccaaggtaaaagcgcgtggggtcacgtggttatggtagatatagaggatctggaacaacggtgaatgggaaaggctgcgagggagatccagcatattcaccaagttttcaaacggcagttgctggcgcccctgcgtctctttcacgctggccttcacacgctggagcgcctcgcgccctacctcaaccccattaaaatcggtgtagataaccgcagtgctggcataataaccaatgctactctgcaattccgggcgaatgcgccccgatactggcatgcctatcaccaatcgctgttgctgagcgtaacgcatcagcaccagttggaaggcagtcagcatcagcacgaacggcgttgtttcctgcgtgcgggctacgtgtttcaacgcgaggcttaatgtttcatccagggtgatgctgaaccgggaaccatgtgtagagggttgtgccgggcgcgggtgcagcgatggaaatgtcgacagcagaggcgcgtcttgcaaacgcgcacgccagtaggcaagttcgttcgccagcaaggtatcctggaaccattcgcgctgccagaaggcataatcggcatattgcagcggcggcggaggcagcgacgtttcattaccagcatgcaatcgagcatactgctgctgtaactcatcgaacaatagccgtaacgagataccgtcgatgatgatatggtgcgcgcaaaacaccaaatgacaaccttgatcgggttgaataatctgagttaccccccacagaggaccgcgtgccagatcgaaccgggtgtttatcacctgctgaattaccgcatctagcgctgaagttggggcctgcgctgccagcgtgaccgtatcgagaactaacgaagacgcatcatctatcacctggcaaggccgatcgttacgtactatgatacgggtacgcaagatggcgtggcgtgcttgcacatggcgcaatgcctccgtgagcatcggcatatccaccacgccatgcaaacgatacaccacataaaggttgtagttagtggcggtactgtcgtatttttgcaaaaaccacaaccgctcctgattaaacgacagcgggattgcctgcgccggatccgctttgatgatgggaatgcggctgggcgacacgcctgattgcgccaactgtcgtaatagcttttcctttttttccgccggtaacattcgcgccaatgcggcatgatgtatcgtcatgaccgtcctttccttttcgctgtgttaaatacttttgccaacgtcactcattaatcatgtcgttaactagcacggcaagtgcggaccctccatcatcctgctgctcctgctcgaccaactgcgctaacgcgcgcacgctggcatcctccatcacgtcgaaaaaggaaagagtgacggcgaaccgttcctgtacctgcgccagcaacatgcccagcatcaatgaatgtccgccagcttcgaagaagttgtcgtcaatgcccaagccgtcaattcccagcaatgcttcacaaatcgccactaagccgcgctgcgttttgctctctggagccgcgtaaggcaccgaaaacgccggacgcggctgacggcgcaccgacggttcgctagggatgacacttcccgcgtccgccaccggcgttacggcgctcctctgttcttctggactgtcgacccagtaacggattttgtcaaaggcgtaggtcggtagagagacacggcgcggttgctcacctgcaaacgcagacaaatcgatgttatgccctcgcacccaaagcgctgccacggtatctaagatatgtttgtgctcatcgctgctgcgggcacctgctggcagcgagctgaacgcgagacgatcacctaatgcatgaccgttggtcagctgggtcagggtggcacctggcccgatttccagaaaatcgacatcaaatgtagcttgcgcctcttgcagtgcagcggagaactgcacaggcatcagcatctgttcaatccagtagtccggtgtggtgagagtgtcggcactgacgtgcgcgccggttacggtagagatgatggtgagcgtcggcgggttcagtcgtacattctcaaatgcctgacgtagcgcctgcgccgcatcttgcatcatgctagagtggaaggcatgagaggtatgcaatcgtttgttgatgatgttctgctccgtcagacgctggctgacggcgaggatctccgacgtaggcccggcgataaccgaatagtcaggggcgttaacagcggcaatcgccagcggggcggtaatcagtgcgcgaatctgtgcttcgggcagcgccaccatcaacatggcaccgcttggtgcctgatgcatcagctctgctcgacgcgccaccaagcgcaacgcatcctctaaagagaacacgcctgccaacgtcgctgccacccattcgcccagcgaatgaccaatcattaccgttggcgtgattccccaactgagccacaattgggctaaggcatactcgacgctgaacagcagcggttgtgtgaggcaggtttgcgcaaggcgttcgccttgggctaacgagacttctgctctgaacaactcatggcggatatccagttggtattcacgctcgagtaacgtcgcgcaacggtcgaaggcatcggcgtaggccggccaaacctgatagagctgatggcccatgcgctgatattggctaccctgcccggaaaacaacagccccagcccgagctgtgtctgcgctacaccacgagcaaacggcgctgtcgcggcctgctgcaacagcgtcccggcagcatgtagatctctggttacgagcgcggcgcgatgtgcgaaggctttacgtccctgtgagagtgtccacgccagatcccgcctatccggcagcgattcatgttgcagaaaatcggcaaaacgcgccagccccgaggataaggcactgtcggtcttggcagaaaacggcaaaatactgtaggcaggtacaggcgctcgcgcttgcaagtcaacggctggcgcttgttccagcacaacatgggcattggtgccgcccatgccaagcgaggtgacgcccgcgcgacggatgccgctttccggttgccacggttgacaggtagtgttgatgtaaaacggactattggtcagatcgatctgtgcattgggccgttcaaagtgcaatgttgcgggaattattccctgctgcactgccagcgcggtttttatcaaccctgcgacgcccgctgccgtatccaaatggccgatattggtttttaccgaccccagcgcacagtactgcttttgtgacgcgcccgcaaaggcttggcttagcgcagaaaactcaaccggatcgcccaaacgcgtaccggtaccgtgggcttccacataagtgatatcctgcggtgtcaaacctgccaaccgctgtgcctgagcaatggcgcgcgcttgggcatccacgctcggcgcggtataactgatcttctccgaaccgtcgttgttgacggcaaatcctttgatgaccgcatagatgttatcgccatcacgcagcgcttcatcaacacgctttaacaccaccagccccgcgccggtgccgggcacaaatccgctgctgttatcggaaaacgcccgacagtggccatcggcggcggtgatcccaccttcctgcgacaagtagccggtttttgctggtggccccagcgttactccgccagcaatcgccatgtcacactgccaagtcaacagactttggcatgccacgcacaccgccaccaaggatgtcgatgaggaagtctgcaccgtgatcgccgggccgcgcaggttgaggtgataggcgatggtagtagtgatactgtctttgtcgttaccaatggccgcctgcaaactgccagaagagaaaacgcgtttaaagtgcggcatcaagttcagcatcaaataggaatccatgcttttgccagcaaaaatacccacatcccccggataatcggcagccacatagcccgcatcttcgaaggctgcccacgcggtttccaacaggacacggtgctgaggatccatcagctccgcctctcggggtgcgataccgaagaaagcagcatcaaatttatcgatgtcagctacctcccctttggccttgacgtaatctgggtgctgaacaaattcaggactgattcccatcgccagcagttcctcatcgctgtaaaaggaaatgcactctcggcttgccagaagattttcccaaaacgcctgtaccgtatcggcttgagggaaacgccccgccatcccaatgatagctataccaaaatcattctctgccatgttgctttccccctatattcaggtttatcacgcgtttcattcagtggaatcagtgatgactgtcggttgtggctgcccagcgcgtgtgaccaaaggccaaacgctgcttcgccgcacgcagttgtgtctgatctcctgtggtcccttgcgctgcgtccggggccagcagaaattccgccaagcgtttgatggtagtgaagcgcagcaggtcaaccaacgccacgtgctgaccgcactgctgcccgatgtattgctgcatctgtactagcagaagtgagtgtccaccgagatcgaagaaatttgtggtggtgccgacacgctccaggccaagcaactgctgccagatctccgccagacgctgttccagttcggttgccggagggacatactcgcccggcccttccaactgccgcagatcgaccagcggcaggcactggggatcgattttgccgtttacacctagcggcatggcgctcagcggcacgtagagcaacggcagcatatgcaacggaagccgcaggctgagccatacgcgcaattgctgagcatccagcgcaacgccgttgacgctgcaatagaaggccactagtagcggcgttgccgccgcattgcgtcgcacatcgacccacgcatcagcaatatccggatgctgtttcagtaggctttcgatgtcgcccagttcaactcggtatccacggatctgcacttggcgatcttgtctgccgagatagaacaacatcccgtcggttgcccaacgagcacgatcgccagttttcagcacccgaacgccagggtattccggcaactcgacaaagcgctcgggatcctgtcgtgcatcaaggtagccgggcgaaatgcccagaccagagaaacagagttctccacaggcacctggcggtaccaaacgattatatgcatccaccacataagcttgggtgttctgaatcgggcggccaatgggcaatgctcccgtttcttgctccctacgctttgcgacaggaaagtaggtcgagcagataccgctttcggtcaggccataaccgttaaccactgccatgtgcggcagaagcggcgctatctgctcatactctaacgcttcaccaccgcacagaaacaagcgcagcgatcccatcgactgagccagcacagagaggctggcagaaagcgatggggtggtgctcaggatagtcacccgctgagatgccagcagcgcaatgagcgcatcactatccaaactctgcgctttttgcgccaatactaaggtaccgccagcggcgagcagcggcagtacctccccgacaaagctagcagacgcgactgaggtaatgggtagcagaacatcctgatgcgtcacttgatagctggatataaaggatgcggttaagttgaccagattacgttggctgagtcggacgcctttgggctgcccggtagtaccggaggtaaagatcaccaccgcatcgcaatctaaagcatctggcgcaacactaactggcaggttcggtatttctgtcagcaggctacgccagtcaggcactagcacccaaggtatcgtcagcccatgaggggattccagcggttgcgccaccagcagcatgcacggcgttgcctgcgccaagatcagggcattgcgggccgctggcgcgttaccatccagcggcacatagctcgcccccaaagagaggatcgccaattgtgcgataatcaattcgaaacaaaaaggcagttgcagtgcgacagattctccgcgttttacgccttgcgcacgcagccaagtacacatctgcatcgtggcctgttgcaattcgccataggtcatggcgtcgtcagcgtggcgcaaagccacctgtgtagggcgctgctggcagtgcggtaacactagcgccagcaggttatctacgggcggcagagcaacttcagtggcgttgtgccgcgccagccaagcgtgctctcgaggggtgaaacgaatcaaatcgcggactaactgcgtgggttggctgctggcctcatctagcagttctctccactgcgccaccaggtgctgaatacgatccgcactgtataacccagcgtcgtattcgaaagtgccggtgatgcgcccatcgatatgctgcatacttagcgaaatatccacctgagatgcactggtatccaacaataatggtgtaacgttgacaccgtttagtgtcgggctcgccagaggcatattgtcgagttggaacatgcactgatatattgggaaatgtccggcgctgcgatccacattcactgcgcgcactatgtcggtaaattcgagacgctggtgcctgaaagcggcaaacagaatacctctgatcgtctgtactaactcggaaaacgatgccgcttcgtcaagaggtaagcgcagcggtagtacgttgaccagcggcgcgatcatatgctcctgttctttcgtcagccgcgcagcaatcggcataccgacgatgtattcctgttgacgcgcattacgatgcagcaggaggacgaaggcggtcagcagatagttatacaacgacacgcgctgcgcacgcgccgccgccaacactcgctcgcatgtgttggcagacaatgcgaaggcaacaaacgcgccttggtaacgtgccaccttctgacgcggttgatcggtggggatatcaagaatcggcaacgtccccgccagggtattttgccagtaacgcatcgcgtcctgataggcgtcactctgacgccactcttcttggtactccatgtagtcggcatactccaacaacggttctggcgtcagcgattcaccgttatatgcggcctgcaattcgcgtaacaaaacgcctttcgaccagccatcactgatgatgtggtgcagatgaatcaacaatacgctacgatcgtcatcgagcgtcaacagttcaaaccggcacagcggtgtgcctgacgttaagggcatggggtgtgccgcacgctggttgatcatcgcctgtagcgcgttatcatcactcaccgaggggagtggcactatggtcagcaacgcctgcgacgatacgcactgaggcaccgccaatactggttgtccattgtgggtttccgccatagcacgtaacagagtatgccgactcatcaattgacgaatcgcgccgtccatccgcgtgcgatccagttctccttcaagcagcaaggcggtggggttattgtatagtgcagtatgcggcgccaattgttgcataaaccacatcgacgattgagccgatgacaacggtaggtagcgcacggcgggagtttcacgtaaatcgacgcgactggctgagtacgcccgcgccaagtcgagcaacgttttacgacagcacttgccattgtcggagagtggtaactctgacattgccaacaaacggttcggcagcatgtaggcaggcaagtttttggacagtgcgtccattaaggccgccaaattgagcggcacgctactgacgacaaaagcgtaaatcaactgattgtcgggatcatcctgatccgccaccacgactgcctgctgtacccccgggaaacgcatcgcatgggcttcgatttctcccaattcaacgcgcaaccctctaattttaatctgaaaatcattacggccaatgtaatgaatttgttggctttccccgtcgcgccacaccagatctccagttttatacagccgctccggtttccctaaatggcgcaaagttggatgtatagtaaaacagcgatcagttaacgccacgttgttgagatagccacgtgccagcccgataccagcgagatacagttcgccctcttcgccgtctgctaccggattaccatggtcatccagcacatagagtcggcaaccgtcaatcgcttgaccgatagggatatcgtcgtagtcgtacccgcgcaggcagcggtgatgactgacatcgattgctgcttcggtcgggccatagagatttataagatcaccctgcgccaccgattgataaaagcgagccacactgtggaccgtgagtttctcaccgctggaaaacactaatcgcaatgaggcggtcaaacgaggatcctgtttcatctccagatactcgacaaacaggttcagcatcgaagggacaaagtgcacaaccgacacgcggtgacgctgaatcagtcgagccaaggttcgcggatcgctctccagtccggacggtaacagcactacagatgcgccgtacatcgcccaccagaacatctcccagacagagacgtcaaaggtgtacaccgtcttctgaaacagcacgtcctgagaactgataggataagcgttctgcatccagacaattcggtttagcagcgctgcatgttccgtcgccacccctttagggacaccggtggaaccggaggtgtaaataatatacgccagttgccgcgcatgtggtcggtaacgcagatccgtcgttggcatggcactgaccgccgcgctgtcgatttcgacgcgaggaatcggccagcgatcaccatcgtcagtaccgatcagacaaacagcgccgctgttgctcagtatattttcaatgcggctacgcggtgcattgtacgccagcggtaaataggcaccaccagcttttacaatagcgaaaatggcaatcagcattgccatgccgcgcggcaggcggatagctaccacacgatcctcgccgatccccagcccacgcagataatgcgccagttggttagagcgtgcattaagatcgtgatagctcagcgccgcgtcccccatcaatacagcggctttttccccatattctccggcgatacgatacaaatagtcgactatcgtttggtcgtcggtaggcaactgtctcataatcccttgctgttccataactctggccttcaaagcgagataagtacgtaaaatggcgtgacgggttacgcctgtccgccgttgtcggaagccaaccgcgcgtggcaggcgtcgatttctgcctgactactgcctttgagttgaaatccctgttcaagaagctcatgcaaaaaagcaatgtcctcttcgctggatgtgccgcgctgctcaatctgctggatgcgctcaaaaaaacgactgagcaattctttcaattgcgcactggcagccacatcggcggcgcggtgatggcgtgtggctgtcagggcgttagtgagcagcgtgatgcgttggcggcgcacggcttccggatcggtcttcaccgccatgttatcccccagcaccaatgctagttgcgcacgatcatgacgattgtcaaatgcgtaaactggtgctggatagcgattctccagcagcaggtttttcagcacactttgcggaccgatctctatcgcgatcggtgacaagtgtcctgtcaggtaggtgagagagcgctgccactgcactggctgagagagctgttgttctagccactggactggcgtgaccgtatcgggatagggttgagcgttgacattggagatcactgggcagcacggacgtcgccattcgcagcgatccagcgccttgcgcaattgctgtccgcaaggtttcaatagtgggctgtggtaaggaacaccaccaatcagcggcactacttcgacttggcgatcatgatccagcaggtattgctcggcggcgataatggccgagttttgtccggataacataaactgttgcggcgaattgaagcaggcaataccgacctgctgtcgggtttcacgctccgccacctcgcacgccgctgccaccagtgcctgattcccttgcttgatgatggtggtactcgcgtccatttcgcgggcgatctcactggctaaacggctacgcatcgccaccagcgccagtgcttgggaaaagctcagcgcaccactacaggtcagcgcagcatattcgcccaaactatgacccaacatataacgtaggttgacatggacaccggtttgcgccaaaaactgctgccacgcgacaaagtgggccacgctggtggtatagatagccagcgccattgccgtcggctcagcaagttgtaccaaagtacccgacaggcacagcgctgccatgtcccgttccgtgatctggctagcttcatcaaacagagtacgcacctgcggataacgctcatacagccaccgtgccatgcctacatattgcgaaccggagccagggaacatcagtgcgacatccttcgtcatgcttcactccccatcatgtaattcatcgcaatttggatttcatgaatttgcgatgtcccttcgatgatttccatgattttggcgtcgcggtagtaacgttcgacggcataatcggcatggcaaccattcgcaccgagcagttgcaccgccttcccggccacgtccaccgcagctttggaagcgacatacttcgccatcaggatttggtttatcatggccgggtgcagcgtttcgcggtattccgccgcgctgaagcacattagttgcgcactgcgcgtttgggtcagcattgtggcaaacaagtgctgaacaatgccatgagaaaataaccgccgcttgaactgtttacgctggcggatgtagcgcgctgccacatccacagcggcccgacataatcctaggctgccacaagcggtggtgaaccgcccttcattgagcgcaaaattcaccgccagcggtaccccaggggtgagcggaccgagcaatgcatcctccttcaggcggcagtcattaaaatgcagctctgccaacatattgccgcgtaaccccaacatgtcgttgagtggagtgatagtaaagccgtcggtattgcgatcgataagcactgtcgctaattgattaccacagtggattaaaacaataaaaaaatcagcaatctgccctagcgtgatccatttctttttcccgttcagccgccaaccgtcgccatcctgctgtaattctgtttccacgttcactaagtcactgccgatattcggctctgtgagggcaatcgcgccgatcaattcccccgttgccagctttggcaaataatgggctttttgcgctgcgctgcccacgcgttgcagcagcgtgctgaccatgccagtcactgttatgagattttctaacgaaccgtgaaccccagccatcacttcatgcaaagcgcacagttgataagaatcgtaacctcgtccgccatatttttgggggattgacgcacctaagtacccggcctgcgccacgcaagaaataatgtctggcacaataaactgctgacgttcaatattctgtgcagccagggcgagatgttgtttggcaaacaggactgcctcttgctgagccagctcataattttcagtgcacatagtttactccaggcctgtttgtcgctgaatgagctccactattttattgacggtagcaatctgttctgttttcaactcactcacttccagctcaacctgaaaatttttttctataaacagtatgatttgcacagtaaataacgaatggacaagcccgagagaaaaaatatcgtcatcatcgttcaacgtatgcccacgtaatgagcgtgaaagaaattcccgaatggcggctttcatatcttgctttttcatattcatatccctatctggttaacccagaatcactgctcggcgtacgtctgttgatagcgataaaacccctgccctgatttcacgcccaaataccctgcatcgaccattttctttaataaaaagctggggcgatacttatcatcattaaaactttcatatagcacctgcaacgattgcaaaatcgtatccaagccaatcaaatcggcagtttgtagtggccccatcttgtgcccgaagcaggttttaaacaacgtatcgatatcctcagcacgggcgatctgctcctgcaccataaatatggcttcgttaacaaaaatcatcatggcacgattagtgacaaagcccggagaatcattgaccacgatgccggttttattcaactgagcaaataagtggtgaaatatgttcagtgtacgctctgcagtatgtacaccacggattaattcgacggtgtgcatcagcggtaccgggttcataaaatggacgccgactacattctccggatgtcgcattaattttgacaacgcagtgatagatatggcggacgtattaacaccaaacactgtcgacgcgccgcagatcgtattcatccgtgtgtatagtgcattttttttctctatatcctcagtaatattctcaatcaccaaatcacattctacaatgtcgtccaactcagttgtgaaacggatattttccattatctccgctgtgctatgcgtcttttttttatgctgcgggtgaaaattatataagcgtaagttcgcttcgatcatctgtcggcatttatccaactgagattgagaaatatccacaacgttagttgatatgccgtattgcgccatgttatgagcgacgccagttcccattactcctgcacctattaccgccacgttcatcattgagctcctttactgacaggctatttcgaggttgtcttcgccccccagttgcgccgcgatatgcgcgtagatattgcgcggattggggttttccatcagggtcaaaagatcgatatgtacgttgaaatcgcgttctaaacgggaggtcaattgcgtcaccagcagcgaatgcccgcctaattcaaaaaagtcgtcgtccaccccgaccggcgatatttccagcaacagttccatcagacctgtgatatactgcataccccgcgagtgtgcggctacgaaaggtacgcttaacacgggacgtgcctgataagggtggtgcgtttcgggtcctgcttcgggttgggtctccacactacccattacccgtccaggcaatgggtagtggttgtgtgcgaagggatatgctgatgcgctcccgcgttgcggcagcggagtgccgtaccacacggcccaatccacattgatacctgcacaccacagttgcgccacgtagcgcaatacatcaacgtcttctcttatttccggcggcagcctaacccagttgatactgtgaacgccctcccccagttctcgggtatctgccaacagcgcttcactccaaaaccctctgtcgttacgctgtgcatcggtgatgggatttccttgccaagccagcacgtagccggggataggttcatggcgctcaggaagccagagatgaagcgccttttgctccatttcccacagcaaatgcaacacgtcttgcgtcgcaatcatgccactggctgcagcggcaggcaaaaggcctgttccagcacccgacagcagtgttaatgtcggtagcaggttcatccaggtttttagcgcggcgatagtctggcagcctctgattagcaggctgctgttcgcttgtgccgcccacgtttcagcgtggcaataagcgggtggaatattcatgccgtcgagtaatgccgtcagagcagtcgcttcgcgttgataatgtgccgaatgcgccagccactgtgcgtaagtacaatcgttcgtagtacgtagatctggacagtgtaggccccaaggagcgtcgggcattaggttatccagcgatgccagcatcgcttgcgtaccatcgttttccacttgtatcactcggcggcaatcaaacacggggcgcgccacttgttgtgtgtaggctagcgttgacgcatcaagggtagccagcaacggggtaagctgttgcgtcagctcatccaactgctcgaaagacggcgcggagagagggataaacaccggtgctcgcacttggtcatggtcatcgcgcaccgcaggattcagcccttccaaaatcatatgcacattagtaccgccaatgccaaaagaactgacgccagcgcggggcggcatccgcgatgcgggccactcctgcggctgtatcgggatataaaacggtgaatgcgccagatccagcttcgagttaggcatttgatagttggcgagcggcggaatggtccggtgatgaagtaccagcgccgtcttgattaacccagccacgcccgccgccgcgtgggtgtggccaatattcgcctttacagcccctagtgcacagtattggcggtgtgaagtatcgaacgcctccgtcaacgcagcgaactcgataggatcgccaatacgggtgccggtaccgtgggtttcaacgtagccgatgctttctgggcttacttctgccagatgacaggccgcacaaatgaccgccttctgtccctcatgaccaggcgcgacaaaaccgattttttgtttaccgtcattgttgaccgcgctaccccggatcaccgcatagatgcgatcgcccgctgccagagcatcttccaaacgccgaagcacaaccacacccgcgccatcgccaaacagggtgccagaagcctgactgtcaaaaggacggcagtggccatcggtggagtggatcatgccctgttgacagaagtagcctgacttctgcggtaaatcgatagtaattccacccgccaacgccagatcacattcgccaaacaacaagctgcggcaagcgatatgcgttgcactcagagaagtcgaacaactggtgtagagactatacaccggaccgttgagattgagactgtaggcaatgagatgtgcgagcagatccttatgaccatagatgccagactcaaaacgattcagcgcatcgccgccaatctgtgacagcgaacgccgtagccaatccacatcttctgacgcccccacgaataccccggtgatcagatcgctggtacgttgggcatagcctgcatcttccagcgcatggtaggcaacttcatgtaatacgcgggatttcggatccagagtctgcgcctctttgtgactgtaaccgaaaaatgcagcatcaaagtcgcatatgccctcgatatagggcttggcccgtacataggccgggttgtccagagtactctgttcgacgccttcggccagcaactcctcctcgctaaagaaggtgacgcactctttaccctgaacgatgttatgccagaattcgtgtaacgtccgggactgcgggaaacggaccgccataccaataatggcgatttccatgccgttcatttcgcttgcgtattccataaacttcattacctttcttcagggcgaggaggcgcccggattaatgcaaagacgtgtgactgcgcgcagtatttttcgcaatttgcaaagcacgttttgctatctgattcgcgcgcgtattcgtctgtactgcaggctgtggtgatggcgcatttgactcgccctccgggggctggcaaaacgtcgccagctggcgcacggtggcgtggttgtacagcgacaccacgctcacttgcggatagtgacgcgccatttgcccactcagttgcaccatatcgagtgaggttgcccctaattcggcatagttgtcgtcaatgcctactctatccagacccagatactcttccaggatttggcagagcacgcgttccacttcacgtgtcgcggggctgtaaggcacgccaatttccggacggggccgctttttcactgtctgctgagtaatcgtatcgttagcggcagacggtacaccgcgatccacccggttgccccgcgctaatctatcgatcgcccgaggtgagagcagcagttgcgcccacggactgcgagtgttcagtatcggccacaattggcgcatcacctcggcattgctcatgctgagcgcatagccgccgaggcgcctttctgctatcatggcgttcagccggtccatgcctgccgcagtgcgatgcgttaccaccaccttgccaatatgctgcggcgtggtcagggtggcgaaggcgcgtgcaacctcgggcaatggtacggatttgcatggaaggagcggtagcgtgttatcatctatccaagcgacaatctgttgcaggtagcgactaaacgcaccatgcgccgcgtgaaaattaatcggaataaaggtgccgccttgggcgaagaaacgcatcggtagcgctttgtcttccacaatgtccttgctgcccagctcaagaaaacggcccagcggtgccagcagcgcgaggctagcgtcaagcagacggcctgtgagggagttaaggatcacatccatcccctgtccgtccgatgcggtcagcagagtggcagcgaactgttcgtcgtgtgaatcagctacggcatgtacgcctagcgaaagcaagtaatcgcgtttctgctcgctacctgctgtggcgaaaatctgtgctccgcagcgtttggcaatatgtagcgcagccaagccaacgccccccgccgcactgtggatcaatactcgttctccgggttgcaaattagcgcgcaccaccagtgcgtaataggcggtgaggtatgcgataggcagcgcagccgcctgttcgatgcgacaatgggctggttttctcactacgcaatcgctttctacccgtgcgtactggacaaaaccaccgtttagcaccgccataacatcctctcccggggcaaattcagtgacatttttacccacgcgagtaatgcgtccggcgcactccagtcccaattgcagcggagcctcacccggctgctgccggagcaatcccgtggtgaacagcacatccttaaagttcagtccggtggccagtacctcaatctctacttgtgaatcccccagcgctaagcgcggcgtagggcacaacgctagctttcctgccccctccccctcagcggccagccgcagttggtagttatcggcactgggcacgcgcagtcgcgtgtcgtcatcgacatcttgtatgtggagctgtaccttgcgcttcaccattgccgcacagcgggcaaccatctcgcctgccatgtcgtagagcgtgaaagcgtagctgtcaccctcctcatcgtgccgattgacagtcagcgccacatgtaaggtgttcggcaacgggcggtacaggcgtaaatcctgataaaggaaaggtaccgaatcagtatgaaaaccaggcagttgttcgacaacactgctggcgatgtccaacagcgcagggtgcagtgcgatcgtatcattagcggcaacggtgggcagggccagcgttgcgaaaacctgagtctgggcggtattgccatacagttgttgtacgctgtgccagcgcggcccatagtggaagtgcgtgctcgataattcctttgttggaggagtgatagtgtgcatctcgcgcatcagccccgtgagatcgcacacaacattatcgtctaccatcagacgcgtcgccctgcctctggcatgggttgttaacgtgccactaaagcgctccgtcattgatttcacctcgacactaactccttgcccgttaggtgaaatgtcaacaaaaacgtcaacactgcagttgtccatcacagtcaacggtgccaaaaagaccaattcatcaatgcagatttggtcttgcacaaagtaatggcgcagagcttcatacgccagcgccagatagccggttcccggcagcgtggcgataccggatatccggtgctcatccagcagccaatcggactcgggggataatcgcgcgtagtagctggtgtcagccccttgttgtttataagcctgtagcaacgttcccgtcatcaatgggcgcagtccacgcaagacatcgtattcactgccgtttatagcatccaacaacatgccctgctcacgcaatgcatccaacccgatactgagcgcattcaccttgtagcgggtacgcagttgctgtgccagtgcatccaaataggcgctggcggtagcatagcctgtctggccgatctccgcattcacggcagccaacgagttacagaacagcagtagcagacgctcatccagcagattccgttgcgctaacgcatgcagcacattagcagtaccccgttctttcaccgttagcgtgtcgcgtagcgcagattcgctcaattgatgcagtgtcaatgtggtggtagcgtcggcagcaaaaatcacgccatccaaccgtccatagcgttcgagcagagttgccagacaagctctaaccgcctccgcctgcgtcacgtcgcagtggataacgtctaatgcgtcctgctgcaccgcttcatggtgataacctgtgcggctgctcagtaccacacggactccctcacgctgagcaagcgcttcgccgatcatgcggccaatccccttttcaccgccgataatccacagtacgttgcccggtatacaccctgtttgagggggtaagtgcgccaacagccgtgtcgggataaagcgtcgcaggtaaagcatcccctgcctgagcgccattaccgtttcttgtttcggggccagacgctgggttagcaagttcagattctcatcactgctctgcgcatcgatatcgatcaatcgtacttcggtcgggtgcagctcttgggcaaacacgtttactgcgcccgacaacgctgccagcgtcggttcgggattatcctcttcctgtacgcgaaacgcaccatgggtcaatactgttaaggacgccagcggcgtggtgctgtgcatacaccagcgagcaacacgataaagtcccgagagcgactgtgtcaacgatgatcctgcctccgcaccgggagcatacaagcaatgtaactgtcggtaggttttgtgtgctaaaagtgcgcagatgtcgtggaaatgcgtcagaatacggtcattatcccacacgtcgtcctctgacgatatcggcagcggcattgtgatgctgtcgacaccactactcatcagcgtctgctgtaacttgtcgccgtcagcactaataatgatgatcaattcgcccggcgcatagaacgcctcccgcaaggatgtgtcgtgcatccgccacagcacacgctggagccactcatcttgcggacggcgcagaggatttggatactggcgataaccggaaagtgcagcaccatagcgatagtaataagtctgttcgaaggggtaatccggcaatggaatgtgcttgccgagtgccgtctggttaaagcgtctccaatcaatattctcccccctgacccacagcgccgccagcgtacgatgcaacatgtgctcatcatcgatcgccgcgttggctttgcgtagcgtcaacagggtcggctgatcgctgtattggttatgtccttgaataaaggtagagagcgtattacccggcccacattcgataaacagcgtgggttgtaccaacagttgcgccgcaccttcgctaaacagcaccgcgttgcgcacttgctgcacccagtaatccggcgaggtagcttgctcctcagtaatccatgtaccgcttacattagatataaagcgcttgtgcggcgcgtgcatcgggatttgccccagcaactgtgcaaaatcgtgcagcatcggcgtcatcatggccgagtggaatgcgtgagaggttttcaggcgcctgtgctgtatcccgccctcgactaagcgtgtgctcaaacgggaaatggccgcctgctcgcccgcgactacgcaaaaatgcgcgctattattagctgccagttcaataccccgttctgcagctagccatggggtcaactgttcgcgactaaggtagaccgccatcatgctaccgggacgcatggactgcatcaaacgtccgcgcgcctcaatgacgtgcagcgcatcctcaagagtaaatacgccagcaatacaggccgcaacatactcgcccagactgtgcccgatcatactgtccggcgtaatccccagatcaatcaaggtgcgcgctaggctgtattcgacacagaacaacgccggttgtgtgaactgcgtttgatcaatatcccgcgtatcctcatcgtcaaacaacaacgccttgagatcgaccgtcgaatagcgttggaatgcagcaaagcagcgatccatgtgctggcgaaacatgggttgatgagcatagagcgcgctggccatgccgtgatattggctaccttgaccaggaaacatgaagcagatctccgctgtcgtgcgctgaccattgaagatttccgcttgcaatatcgtggcacaggagagatcgattttcgacccacgactcaccaaataagcccgccgatggtcaaaggctgtgcgtccagtttgcaatgtataagccacatccggcaggcgcacccctactccatgcttgacatattccagtgtggaggccacgcgcaactctaacgcagcgggtgttttagcggagaacaacaacagatagctgtcgcgtacccccgtcgctgaagggtcgtcctcatgttgatgtgcttctagtgcgatgctggcattggtgccgccgatgccgaaggagctcaccagtgcacgacgaggacgcgtcgacggccacggttggacttgctggttaacgtacaatgcagaacgcgatagatctatagcaggattgagttggcgaaagtgcgctgttggtggcaacacttgatgatgcagggcgagcgttgttttgatgacgcccgccactcccgcagcggagttgaggtggccaatattacttttcagcgctgaaaccacacaaaacggaacaggtgttgggccaaacacctcattaagcgcacgtaactcaataggatcacccagcaccgtaccggtgccgtgcgcttccaccaatccgatactgtcgctatcaaaaccggcacggcgcaaactggtgcggattaccgttgattgcccgatcacactcggcgcggtatagccgattttgttattgccatcattattgaccgccgaacctttgatcacaccatagatgcagtcccgatccgccagcgcgtcgtccagacgttttagcagcagcattcctaagccatcaccggtgactgtgccagaggcttggctatcgaaaggacgacagacaccatctcgcgcattgatcatgccttcatgatattcatagccccggtacgcaggcatctcgatagaaacgccgcccgccaatgccgcatcgcaatcccggttacgtagtgcgatgcaggcctggtggatagccactgccgaagtggagcaggcggtgtcaagcgtcacggcagggccggtgaggttaagcgcatgggcaatcaatgctgtgacggaatggatattcaggatactggccttgtacagggcggtagagtcggtagtgtcttgcattaccgcattaagccagtggggggatgtcagcagtccggcataaatgccaatcgcaccagtaaaggtggcaggatcgcacccagcgtgttccagagtttgccagcagcactgatgcaataagcgaatttgcggatccatacattccgcctcgttgggagtataaccaaagaaatccgcatcaaaccattcgtgatcatcaacaatccctttggtttttatataattcgcttgtttaagcgtgtcaggtgtcacaccatgcgcgcgcaactcttcatcactgaacagtgttaatcccgattcccctcctacaaccagcgtccacaacgctgcaatattcgccgcaccggggaaacgtcccgccataccgacaatcgccaccggcatgtcgctgtagacaacagcacgcgttggaattgcatcctccggcgatacggcagtatcgagaaaatgtgctaacgccgtgagcgttgggtacttaaagagatcggtaatatcaatctccaagccaagttgccgcttaatatcccctttaaccctgatggtatccaatgaggtgccaccgagggcgaaaaaggaggcattgctatcaatgtcttgtctatcaagtacgcgttgccagatagcatgcagcgcatgttccatgtcactatgcacctctgatatcgtggtggacacggcgttgcactgagttgcgggcaggagataccgcaactgcgccaagtcggccttgccactatggctttttgcaatctccgtcaccaccaccaaggattccggaatagcgaatggcggcaatctgtcagccaattgccctcgaacttccacctcatcatagctatcattgacgcagaccactgccgcaatatgcagcgtttcacgtacgcggtaaggaaccactaccgcctcgataatgccggagcactccagcaggcgctgctcgatctctccggtttcaattcgttgtccattgatcttaatttgaccgtctttacgcccaaaacagtcaacacagccatcatccagcaaccgggcataatcgccagttttgtacatcataccgccgggaataaaaggatcagggacaaaaaccgtcgcacttagcgccgggttgttctgatagccgatggcgacccccactccacccgccactagttcaccggtggcaccgataggcaacaaatgcccatggagatcggtaatgtagagcgaggtgcccggtaccgcgtatcctatcgggactcgggcgggttgcaacccgttgaaacgatatgcggtggtaaaaatagtgttttccgtcggcccataaccgtttgtcaccaccagatgcgggtatttttgcatcacgtcgttgacatgccacgcagatactgcttcgccgcccaccgtaatgtgttgtaacataccgaagaaatcggcaccttctgccacataggagttaaacaaggatgaggtaaaccaggcgcgcgccacctgttcatcagcgatcgtgcggcgaatgtgattgatatcaagtaatgcctgtttgctgagtaatactagtttgccgtggttgagcaaggtagaccacatctcaaacaccgaaacatcaaactcaaatgggcaggtcagcagcgttgtctcaccgctctccaccttcagcgggctgtcgccttgtatcaggcgcaataaaccgcggtgcgccaccgcgataccttttggcttacccgtcgaccccgatgaataaatcacataagcgcgagaatctggtgtgataaccggaaataccaccgagggcgcgacgggaaatgcacagaggtcactctgcgcaacgtttaatgcatctagcggtttgccatgtaccagcaacagcgccaagccgctgtcatcaataatttcctgcatcctacccactgggtagtcggggctgatgggcacataagcagccccgatcaacatgatggcgatgatggcaaccacggtgtttacccggcgttcgctaattatgcctacagtatcgccaaccataacaccctgctgtaccaaataagccgcgagctgctcagcttgtgctgccaactccgaataggtcaacgcgcacaattcatcaaccactgcgacctgtgctggcgaagtcgcagcaacttgatgaaattgttcgatgacgttggattgactatcccaatcccggcatgccatgcgttccagatagggttgaagtacctgcgcctgctggcatggggacaagtttaccaacgcagcaatggggcgctgcggattgtccaccagttgttcaagcagataactcaggtgcatcagcaacgcttgcgccatgttgttggtcaggtagttaagggcatatgcaatactgaaacggaatcccttctgttgagtgatggtcaaggtcagcggatagtgcgtttgttcatgtacactgagatggcgaattgccacgggcgacgcgcatgacaataatgtcatatcaacgggataattctccaacaccactaaggtattaaaaagatccccagcatgaccttctttatgtaccaaccgttgtatgctggctaaggcatcatgttcattgctgtagtgagctattagtgtttggtgcatacgttgtaagtgttgcaacagtgtcgccccatcatcacgcagacgcagcggcaacgtgttaataaatagccctagtgtttcttctataccatcaattggtatatttcgccctgatattgtcgcgccgaataacacatcgtcagcatagcaccaacgttgtagcaggatgccccaggccacatagaagattactgcgggggtgatacgataatcgctgcatagcgtctgtattttctgacacacatccggagacaaattgatctccacatgatttgtttgattaacgtaagaattgttctcggcttcagtatctgtgtgatattgtgacagcggcacgatacaagttggtgttccctcccgaagatatgcagcccaatagtcgtgctgaaaggtgtgacgtcgggccgacagtgtgtctacaaggggtttcagagatgaggggataatggcgctatcatccctcacaccactgaccacagccgctccatagagttggagcaactgtttaatgaaaagggataagctccagccatccatcacaatatgatggtatgatagtataaaagcactttctttcgttgactgaataaggtaggcccggactgggatcgttttcaaggaaaatgggtattttaaatcagcctgtagcagttgaggaattatagcatcaataccgtcatcctgcgggacaggaatgataatgtcatcattagctagtagaaaacgtatttcctcttgctcacagtctaacacatatatatccggcaacacatcggtcttcaccacctgacaagggcgctcatcaatctcccagttataatcagtgcgaaaacactcatgctttcgaaataacgtttccagcgcccacttgaagtgggcgctatctacatgctgagaaaaaatgcatgtaaaatgctcatggtagttactccttttcttatcctttaaggaatggaataaaaacccctgttgacttggtgttagcggtaactgcttacgcgtgtccatcttattacatggaaaatctccagaggtattatccataaccatcaccttattatcggatttatagattatttaacatgattattctaaatggcacacctatccgcaagtatagttttttattgcgtattcatataatcatattgcattttatcacttacaggaatacccccaaaaaatccttatattctgattacatgtttttcttcaatgaattagattctgtctgtaagcaaaaacatgtaagtcatgcagtacatacatgatgtagcgggtatgaattgatacagccaccacatagaaaataatgcgtaattcccatttacataaaaaccgttgtatcgtaaattcctcttaaatactgccaaaacaacagatacacagatacacagatacacagatacacagatacacagatacacagatacacagatacacagatacacagatacacagatacacagatacacagataccattcaggatggggggaaacatggataagttcaaagaaaaaaacccgttatctctgcgtgaaagacaagtattgcgcatgctggcacaaggtgatgagtactctcaaatatcacataatcttaacatatcaataaacacagtaaagtttcatgtgaaaaacatcaaacataaaatacaagctcggaatacgaatcacgctatacacattgctaacaggaatgagattatctaaatgaggattgatatattaattggacatactagtttttttcatcaaaccagtagagataacttccttcactatctcaatgaggaagaaataaaacgctatgatcagtttcattttgtgagtgataaagaactctatattttaagccgtatcctgctcaaaacagcactaaaaagatatcaacctgatgtctcattacaatcatggcaatttagtacgtgcaaatatggcaaaccatttatagtttttcctcagttggcaaaaaagattttttttaacctttcccatactatagatacagtagccgttgctattagttctcactgcgagcttggtgtcgatattgaacaaataagagatttagacaactcttatctgaatatcagtcagcatttttttactccacaggaagctactaacatagtttcacttcctcgttatgaaggtcaattacttttttggaaaatgtggacgctcaaagaagcttacatcaaatatcgaggtaaaggcctatctttaggactggattgtattgaatttcatttaacaaataaaaaactaacttcaaaatatagaggttcacctgtttatttctctcaatggaaaatatgtaactcatttctcgcattagcctctccactcatcacccctaaaataactattgagctatttcctatgcagtcccaactttatcaccacgactatcagctaattcattcgtcaaatgggcagaattgaatcgccacggataatctagacacttctgagccgtcgataatattgattttcatattccgtcggtggtgtaagtatcccgcataatcgtgccattcacatttagagatcatccggcataatcaatctgccaacgaaggagagcgctatgcgtaaagcccgttttactgagcatcagatcatcgccgtgattaagtcggttgaagccggacgaactgttaaagatgtctgtcgcgaggccggaatctctgaagccacctattacaactggaagtccaaatacggcggcatggaggcttctgatattaagaaaatcaaggatcttgaggacgagaaccgccgtctaaaacaaatgtttgccgacctgagtctggagaaccgggcgctgaaagacgttatcgaaaaaaagctttaaaaccagcctttaagcgtgagctggttactcatctgataacgacgttcgaactcagtatccgtcaggcctgccggagtctgaacctgagctggtctgtcgattttatgcatgatgccctggtctgtggccgtcgttttcgcatgttcaatgtcgttgatgattttaaccgtgaggcattgtcgattgaaatcgatctgaatctgccagctcagcgagtggtccgtgtactcgacaggatcgcggcaaaccgtggctatccggccatgcttcgtctggataacggcccggaatttatctccctggcactggctgaatgggcagagaaacatgcaataaaactggagtttatccagccgggtaagccgacgcagaacgctttcattgagcgctttaaccggacataccgaacagaaatactcgatttttatctgttcagaacgctgaatgaagtacgggaaatcactgaaaaatggttatcaaaatataactgtgaacgcccgcatgaatcgctgaataatatgacaccggaggaataccgacagcgccattatttggccgggatctcaaaaagtgtatggaactaaaatgggtctatttacactgctgctacgataatgcctgcgtggaaagcttctttcattcactgaaagtggaatgtctccatggagaacactttatcagccgggaaataatgcgggcaacggtgtttaattatatcgaatgtgattacagtcgctggcgacggcacagttggtgtggcggtctcactccggaacaatttgaaaaccagaacctcgcttagagcagtgtccatattacgagggtaggatcagtcgtttctttcgcggtaactttatatgatcgctgtgtaccagcatcgagagaagaaattcaggatgtattcaacactgagttcacaagctctgtagctattaagtcagtattatttacgtttacgatacatgttattatcgcaggatctttatcttggtagtgatactgcgagtggatacacccccactcagtatcttctataactatggcttttggttcttcaggcatcataccttccataacacgttcttgatggatacgtaacttgtagtacttctctggagatgaagaaatttcaacgagtacagattgtagatgtacgaagcctagaaatttaaaacactcggattttgtagaggattttaatgataaagtccagataacaaacacgttattggaaccatcaccataatttttagtgtcaatcttatctaccagctcctcgttgattaacatagactgatttagcaacttccgcttcacgccctgagcggactgttatcgctctttagacacagttccactaggggagaggatcagcgcttcccacgtagggacactatagtaactatcaccacatgcagtagggaagctcaaaccaaatttatgtagccagctcctattggtggtcattctggtggtcttgacaggaagataactctggtttagcttacttattagccacttactggcaaaggcgatcccagtcagaggagccaaattcaaaaaagcctgctttcgagcaggctttttactttctaattaccaacgctcttaaaacatctgtcttgaaccagaactaatttgcacaggcattcccgatcgatgttgcaacgcagcatttgcgcgatttacatcaacttcttgcccgttgataaacgcccgcaaagatggggttaccggcaatggcacttttcggtcagactcatattctgcacgattgcgcgacagcggctcatgaacttccagccactttgaaccatccggttccgttgtgtatttcactggctgatcaataatttgtacacgagtgcctacaggaacattatcaaacagatatttgatatcgtcattacgcagacgaatacagccctgacttacacggagcccaataccaaaattggcattggtaccgtggatggcatacaacttgccaatataaatcgcgtacagccccatggggttatcgggccccgcaggaacaaatgcgggcaaactctcccctcgtttcgcatattcgcgccgggtgttcggcgttggcgtccaggttggtgcttcttgtttacgttcaacggtagtcacccagttacgcggggtttctcgcccagcctggccgataccaataggaaagacttccactgtattactgtctggcggatagtaataaagacgcatttcagcgacgttaaccacaatccctttacgaacagtggcgggcaaaatcagttgctgcggaatggtgagttgtgagccaggcttcggcaaaaaaacatcagcgcccggattcgcttccagcatattacttaacccttgcccgtattgtgcggcaaaagtctccagcggctgagtattgtgatcaggaacagttacagtaagcgactgccccactaaacggctaccctctggaggtaatggataagttaccgccaggctattttggctggcaaaaagcagagcaaatgagcaaagaatatttacacgacgcatcatgtccctttcctaagtcgcgaatactatccgataagtatagcttttatcagacttttcgtttttagctgttcaaatcagaagtcgtattccccggtagaacaatattactggcagcaagttcgcccatgttgttgtatatcgcacaagcagcttcgatgatggacatcgccagagctgcaccactcccctcacctaaacgcatatccatattgagataaggctccagccccaaatgcgagagcgctatacgcgcgcctttttctgccgacaagtgagaaggaatgagatacggtttgattgcaggagacatctggcaggctgcgagcgcagcagcataagaaagaaatccatccagcaacacgggtaaaccgcaggaagcagcacctaacatcactccagctattccgaccaaatcaaatccacccacttttgccaggacatcaacaccatcctgaggatttggttgattcaacgtaatcgcccgacgcacaacatcaattttattagccagtttatctgtcggcaggtttgcgccaatcccaaccacttcttcaggatcccggccagtgattgtgctgactattgccgctgccggtgtcgtgtttgccatccccagttcacctacaccaaacagcgtgacaccgttttttgccagctcccgcgtataacatatgacgtccaaaagcaacttttcagcctgacggcgactcattgccggagctgaagcaatattgccgctacctcgtgcgacacgcatgttgataagcccggggataggctcagcagtatcaataccaacatcaattacgtggacgttagcgcccgcttgtgctgccagcacacacacgccggttgttccacgggtcatattttcagcctgtatggctgtcacttcttttggagaaatagcgaccccttcctcccagacgccgtgatcggcacacataaccagtactgcttttttgcccacatgcggtatgccattcaaccccggcattcctgccagttgtatggcaagcgcctccagctttcccaggctaccaacaggtttgagtaacccgtcaacatgccgttgtgcacgcgacatagcggcagaattgatggctgggatcgtattcagtaaatcggcaagtatttgcatgtcacgtctctttatagcagtgccagcaggaaaaccagttcaccaaactctatggctgctcccagcgtatcgcccgtttgcccgcccagcgtacgtttgagaagctgaccgaggatgaaaatcgccaccatcgtcaccaccatagcagccacaccatgcatacccggcaataatacggcagcaaaaatagcggctaagccgagtgtgacgcaggtttgtcgcccatcaattttgccaatgaacacattgccaagcccttcttcccgcgcataacgatgacgatacatcaataatgcggcagtcccgcggctgaccgcacatgctgccgccagcgatgcaaggatcggttcgccacgcagagccaactcgcttaacaccagaatctttgccagtaccacaaaaatcaatgccagaccgccgtgggtgcctaaacggctatcacgcatgatttccaacatgcgatcgcggctacgtgcagaaaatacgccatcacaggtatcagcgaggccgtccagatggaatcccccggtcatcagcgccagcacaagtacgctaaacagtgccgccagtggtacgccacaccatgcctgcagcaccatgaagaccagcccgctaatcgcgccaagcaataatccaatcaaaggaaaagtaataataccgcgagaataatgctcgaaatccagtccctgggaccagcgacgcggtacaggcagacgcgtaataaatgagagcatcgcccaaaataatttactcatttgatttttactccaatacccgaaaccaccagccatacttcatttgccgcagcggccaactgctgatttacccgcccggcaatatcacgaaaatgtcgtgccagacgactctccggcacaatccccattcccacttcgttagtcactaatacaacctttgcggggcaacgttggcaggcagcaatcaacgactgaatctcagcattaatcgcctgttccatcgcctgataatcccattcatcagggtctttatcgccgccataatcaaacaacagattagtcaccattgtggtaacgcattccagcaacacagcctcattcgggttaatgtctgcatgaattaattcatcaagatgttgccagcgctccactgtgcgccagtgctccgggcggctttgccgatgatgttctatccgtgcagccatctcatcatcaaggatttgcgaggtagcgatatacagaacctgtgaagagtccccaataagcacctctgcgtggcgactcttcccgctccgtgcgcctcccgtcaccaaaatcatcataccgactcctgattcaaatgtatgatggtattcattgaacagagcaatggatcccccaccgttgctgaccgcaaaacatttacgcgattaatactgcgcgtaatataattaaaaatccagcattctcaatccattacgaaataagatggcattacggaatagccagactttctcgtgttaacgtccgacaaaatgcgtcattgacagcggtttctgtggattgacacatttcattcagataatgaattaatgctactgccggaccaaccagcaaacgggcattgtgttctgaaatccaggctattgattcaacgtcagcgacagatctgcgctgtaaaagaagttgtaaaacaacgcaataaaattatccggaatggtggcgactatgcactagaacaccacaatttcgctctctcggtaaggcactgtcacagcattcaacagaatgtgacttgccagatttattagcgccaccagatgtttaaccgggtaaccacgacccagtcggggatatattccatcttctcgctgacatcatcaagaataaaaaggtttatcacactcagagcaacgttcttcagcaggcgggataattcttcaacatttaaaagatgtgttattaaaggcatacaaactggacgtattgtattttcttttggtggttgacctaaggtagcagtttatcctgatgcgctgagatttctgtaatatctacgtcaacattctcctcgaatagaaaatgcagcctcggcaagtgattcacattttttaacaaagcgttgttagcgtgccattttcagaagctctccaagaaagcgaattcttttctcaaattctgcattctcagacacagctttctactccatggcaatggcccaaatacgaagttgctcaggatcattagtggtgctgagaagttaaataaccatgcggagtaccactcgtcatcacgtatttatatatcatgaagctattgttgtgttttgtacatcagtagatgtattctgatatactcctttttctagacataacctttcacctgcttgcaaagcttctgtgttctgacattgccaaattgttgcaattctgtatccagccttctttcagtcatagcttcgggccgcgataagactcactgatctgaccctgattcctcttgcagactttatagaccaattaaaatgcagtttctgcaggtcaacgtctgaccatcattgtcatcactctggccattagagtaaccttctgcattcatccttttgtaaaaagtttatgtcagtatcagcaattaaccggacctgatactgatatgagtcttaccgcatatacggtcaatttcagcaattaattacattatccacgccaaagtgtttgtcatcgcaatgatggtaccttctttcagacaccattttttcaactccgttttccacggaccgcactcttatgtcaagagtgcggtccgtggatacaaccagagaccgactgacacgagtcagaggaaacgacggatatgttcagtcgtaaaatatctatcaaaaaacatgattaaggtcaaaaatgtttgatatttacaatttatgaagatgacaataatcacagatacatgagaacataaatgataataattatcattacagcaatcatttgtactttgtattaatgagggatgaaatgttatataatataccttgtcgaatttatatcctttccactctgtcattatgcatttctgggatagtttctactgcaaccgcaacttcttcagaaacaaaaatcagcaacgaagagacgctcgtcgtgaccacgaatcgttcggcaagcaacctttgggaaagcccggcgactatacaggttattgaccaacaaacattgcagaactccaccaatgcctccatagccgataatttgcaggacatccccggagtagagataacagacaactccttggcaggccgtaaacaaatccgcattcgtggcgaagcatcctcccgtgttttaattctcattgatggtcaggaggtaacttatcagcgcgccggagataattatggtgtgggactgttgatagatgagtctgcgctggagcgtgttgaggtagtgaaaggtccatattccgtactgtacggttcacaggcaattggcggtattgttaacttcataaccaaaaagggaggtgacaaacttgcatctggagttgtgaaagctgtttataattccgcaacagcaggctgggaagaatcaatcgcggtccaggggagcatcggtggatttgattatcgcatcaacggtagttattctgatcagggcaatcgtgatacgccggatggacgtctgccgaataccaactatcgtaacaatagtcagggtgtatggttgggttataactccggaaaccatcgttttggcctctcgcttgatcgctacagactcgcgacgcaaacttactatgaggatccagacggaagctatgaggcatttagtgtcaaaatacctaaacttgaacgagagaaagttggggtattctatgacacagacgtggacggtgactatctaaaaaaaattcatttcgacgcgtatgagcagaccatccagcgccaatttgccaacgaagtaaaaacgacacagcctgttcccagtccgatgattcaggctctgaccgttcataacaagactgacacccatgataagcaatacactcaggcggtcacattgcagagtcacttttcgctgcctgctaataatgaacttgttaccggtgcacagtacaaacaagacagggtcagccaaaggtccggtggcatgacctcaagcaaatctctgaccggcttcattaataaggaaacacgaactcgctcctattatgagtcagagcaaagtacagtctcactattcgcacaaaatgactggcgattcgccgatcactggacatggacaatgggagttcgccaatactggctttcttcaaagttgacgcgtggtgacggagtatcatataccgcaggcattataagcgatacctctcttgccagagagtctgcgagtgatcacgaaatggtaacatctacaagcctgcgctattcaggtttcgataacttggagttacgcgctgcgttcgcgcaaggctacgtatttcccacactctcccagctttttatgcagacatctgcgggcggcagtgtcacatacggaaatcctgatcttaaggctgaacactccaataactttgaattaggtgcacgatataatggtaatcagtggctgattgacagcgcagtttactactcagaagctaaagattatattgcaagtctgatctgtgatggcagtatagtttgcaatggtaacaccaactcctcccgtagtagctactattattatgacaatattgatcgggcaaaaacatggggactggaaataagcgcggaatataatggctgggttttctcgccatatatcagtggcaatttaattcgtcggcaatatgaaacttcaacattaaaaacaactaatacaggagaaccagcgataaacggacgtatagggctgaaacatactcttgtgatgggtcaggccaacataatctctgatgtttttattcgtgctgcctctagtgcaaaagatgacagtaacggtaccgaaacaaatgttccgggctgggccactctcaactttgcagtaaatacagaattcggtaacgaggatcagtaccggattaacctagcactcaataacctgacagacaaacgctaccgtacagcacatgaaactattcctgcagcaggttttaatgcagctataggttttgtatggaatttctgatgacaaaaacaatcgttatggaattctttgtcctgatctgcccgctttgcgggcaggctaacgaacgtattgtgtttgttgaaggtttttcgacgttgttttccatctgggggtgaatatttattcttcccgccagcatgactctatagtcattgctacgacaatgactgataaagctggttactgagcctatacctttgtaattcaaaagtgatatcagttcacaacgcaatactatttttagattatttactctcacccagatactgaatcaatggataataccttttgatttatcccgactcggaagaaggtgggataaatattctccttctattgccccttactccaactatcatattttacaatatcaacgaaccgtccatgaagggctgaaattctcttcctgaaacagctctgtcagcccgctaatctgtttcagcctcagcacttcatcctggtccatgcccaactctgtgccaatacgctcatctgtccagcccagacgcgaaaggtccctgacaatgtcagacattgacgttatctggtgttttcccctggcacggttatgccgtatggttgcggcaatacgtgatgcctgtccctttctttccggattaatacaggtcactggcagccagcccttcagacgttttctcgtatccgctttcctgcccagcaactgacgatgaaaaccatccacgaccagataatgctccttctcttccgaaaccaccacaggctgcgtgaatccatcctgctccagtgaatgtttaagcagttttttttcactggaagacatgacattgggattgtaatcgttggccaccacctcatccgctttcacccacaacacacagtccacaggctcctgtgcaaaagggctgacctcatgcaacaccctgcgcagatgattaagggctcgtatggtctcttcttcagatcgttcctgactgaagtactgtcgaatcatgttgctcaatacttccacctcaggtgtcacagaatcccccattccttcctcctttctttcatacgctgcagataacgttcatagtgccggggtttgttcggactgaaggagagggtccggcaccagaaatcattctttatgagtgtcttacagatacgtcgccaagacgggatatcccggctccccaggtcattctcctgttcatccgggatgtcatccgggaagccccgcgtctgataccagcgcaggtagacagcaattttattacggtaatgttctgccgttctttccggcatcacatccagcaggaacatcgcatagctacgccaggtatgatgaggcggcttcgtgatacgcttacgcagggcaaaataggcaccgctctcattggcataaagcgccccgctggcagcacccgacacccgctcacacatcctggcccaagtttccggctccagaacatggtaaagccacagtcccttacgctgttccgggccaaaaggctcacagacccgcatgttgcgtaacggcacgccggcacggtacatcaggtcatacaggggattgtagatagctcgggttctggcgttatatatccatatatcacgggctttccagtcatacaacggatacaaggtgtaataaaacccttcaggtgacgctgtggtccagggtttatcatctgcatatctcagtttgcgctgagacaccagtcccataaagcgattgagcgattcatcagcacgaacaccagtcagtattgccactccacaccggttaccggcaaaccaggaagaaaatgccggaacaaattcttcaaacgtcatggcataccgataaaatgggaaatacgacatatctgtaatagcgtcatctggtggctgacgaacccactccacacctggttcccagcatatccattccggctgaaactgagagacaccgtttaccgtagtcagggggagtgccacccagtaaaaagtctccgtcacatcccgatacatctccctcatcttcagaatgtgtgcaattgtgcactggtactgagcttcccagtcaatgaataatacagagaaacgacgtttcttcctgcgagccacatcggccgtaagatggagcagcacagtagagtcttttcctccagaaaaagacaaacaaacagatgaaaatgtctcaaacaaccactcaatacggtgaatggccgcatgtaatacattaacatctgttcttatcttctgtatggttcccatacatatcctagtataaactatcttggcagtaatattctgaactacaaacttaaaccttctcatcaagaaaaagttctaccttaagggtatattgttactatcacgagttcatgatagttaagtttttagtaaaacacgacatatgacgatacatatattagcaaaattatgacaaatgaggctaccttaacaaaaattcattaatagcaaacacataaataaagactctcctaccaaaaaaacagactcttcactccttcttaactattttcatgagaaataataaacaaggaatttattacctttgaatacaaacttatatatacaatgaacttaaactcttgaatcattatccagagaatatcattaattggtgatgacctagctatgcatggcagcattcatgataatgagtatatactagccagaatgacacaaagagatatttaactaactaatatattgatagtcaatgatgacagatcgtagtaatatattaatacttagccctctgaaatatcaagtcatgtacgatgctcccgttattttaatttcgttctagctgtacttttgaatacaaccataactgattattgccaactgactgaatgaaaaatatcaataaatacaacaaacttactgccttttcgttttatttataagacgttccaactacaagaacaatataggcacatgattattccaacaatactggacaaaaactcccgtatctgaagatacaataggtgataattctttcaggattttgctcaactatggcctgatgggagagtcatgacggaactaaggcctttacaagccagaagattagtcttaatgcgatcacagttcaacttgctacgactgaaatccgtaatagcatataaactctgtttttttaacagaaatgaagatcttcttgttgcataaatgatgcttctctgcctctgaaaaagtaaatataaagtatatttaataagattaatttttatgatagtgataatttatgatggggattcatatggcatatctaaaaggatagattacatgttgaattctacaacatcttcgggaaaaagaaccggcattttagcaattggtgcccatcctgatgatatagaattaggatgtggtgcatctctttcatattattctaatgaaaaagtatatattatatctgttgtcatgacacctggttgctgtggcgcagagtatattgatcgtcacaaggaatcacaagaagcattaaatatgttaggatgcaataaactaatccctctaaattttgaagataccagattatatttgcaaataaaagagatgatatcatctctggaatacataattgagaatgaaacgccccaggatgtggaaattactcgagtttacaccatgaataatactgacaggcatcaggatcacattgctgtttatcaggcatcaatggttgcctgtcgttatattcctcaaatactaggatacgaaacaccaagtacatgtctgtcatttttacctcaagtttttgaatctgtagatgaggtccattttaataaaaaaatattagcattacaaaagcataaaagccagatccatcgaagatacatacagccagaatacataattgctcaagccaaattccgaggacaacaggttagtcattctatgtgtgaaggttttgttgtccataagatggtgttgtaacggagtaatagaaatgaaaactttgttatttatcttcatgaccatagcaatgttgctatggtttttaagtacgctaagacgtaaaccctgtcaaaagaaaggctgtattgacgccattataccagcttataacgaaggcccgtgtctggcgcagtcactggataatctgctgcgtaacccttatttttgccgggtaatttgcgttaacgacggatccacggacaataccgaagcggtcatggcggaagtcaaacgcaaatggggcgaccgctttgttgccgtcacgcaaaaaaacaccggtaaaggtggcgcactaatgcatggactaaaatacgccacgtgtgatcaagtatttttaagtgatgcagatactttcgttccacctgataatgatggaatgggctatatgctggcagaaattgagcgcggcgctgatgccgttggcggaattccctccaccgcgttaaaaggggcaggtctgctgccacatatccgcgccaccgtaaagttgccgatgattgttatgaagcgcacgctacagcagtttctgggcggtgcaccgtttattatcagcggtgcctgcgggatgttccgtactgatgtattgcgtaagttcggtttctctgatcgtactaaagtcgaagaccttgatctcacctggacgttggtggcaaacggctaccgtattcggcaggcgaatcgctgcatcgtatacccacaggaatgtaacagtccgcgtgaggagtggcgccgctggcggcgttggattgtgggctacgcggtctgtatgcgcctgcataaaagacttttatttagccgcttcggtatcttcagtatatttcctatgctgttggttgtgctttatggcgttggtatttatctcactacctggtttaatgaattcatcaccaccgggccacatggtgtggtgttggcaatgttcccgcttatctgggtcggcgtagtttgtgttattggtgcatttagcgcctggtttcatcgttgctggttgttggtgcctttagcaccgctttccgttgtgtatgtattattagcttatgccatctggattatttatggacttattgccttttttactggacgcgaacctcagcgcgacaaacccacccgctattccgcactggtggaagcgtcaaccgcttattcccaaccttctgtcacaggaactgaaaaactatctgaagcttaatgctaaagagaaaaatgttcagattgcagaccaggtgattattgatgaaagtgccggtgaggttgttatcggcgcgaatacccgtatttgccacggtgccgttattcaggggccggtagtgattggcgcaaactgcctgataggtaattatgcgtttattcgtcctggcacaataatcagcaatggcgtaaaaattggttttgccaccgaaattaaaaatgcggttattgaagcggaagcaacgattggtccgcaatgctttattgccgactcggtagttgcaaaccaggcatatttgggcgcacaagtacgtaccagtaatcatcgtctggatgaacaacccgtgtctgttcgaactccagagggaattatcgctaccggatgcgataaattaggttgttatatcgggaagcgttcacgccttggtgtacaagttattattttgcctgggcgaattatttctccgaacacacaacttggcccgcgcgtgattgtagaacgtaatttacctagtggaacttactcactccgacaagaacttatccgtacaggagattaaaatgataaagcatacgttattagtgccgtttttttttagtgcattgcccgcttatgccgggttaacttccattaccgcgggctacgattttaccgattattctggcgaacatggcaaccgtaatttagcgtatgctgaactggtagcaaaagttgaaaacgcaacgctgctttttaatctttcccaggggcgtcgtgattatgaaactgaacatttcaatgccactcgcggccagggtgcagtctggtacaaatggaataactggctgacaacccgaacgggtattgcctttgcggataatacgccggtctttgcccgccaggattttcgacaggatattaacctagccctgttgccaaaaacgcttttcacgaccggttatcgctacactaaatattacgatgatgtcgaagtcaatgcctggcaaggcggcgtatcactctatactggcccggtgatcaccagttaccgctatacccattatgactccagcgatgcaggtagtagttatagcaatatgatttccgtgcgtctgaaggacccgcgcggtgctggttatacgcaactatggctaagccgcggaacaggtgcttacacctacgactggacgccagaaacacgctacggcagcatgaagagcatcagtttgcaacgaattcaaccgctgactgagcaacttaatctcgggttgacggcaggtaaagtgtggttcaacaccccaaccgatgattataacggtctgcaacttgcagcccacctgatctggaaattctaggcagcagtctatcagtatattttattcggtagttttcagagaaaagctataactcggtttgataataaacaatataattaatttcgggcaataacttattcgtatagagcaccagagaaaaggtgctctatacgaataagttattgcccgaatcgtacatcagtttaatagctgagatacttttattttatcatcaccggggtgaaggtatctttatatctctctagacaggccccctgaatctccagacaaccaatatcacttaaataagtgatagtcctgatacaagtttttagagtagtcattagtgaacagataattgttaacttagaaccagtaaaatgcaaacgacgcaccacgctgggaaaatcgctgctattcagcagagttttgtaccgagaattgtggccagccacttattgctctcgcgtaagcaggtatccccatcgtttaccagtccagcacatcttgtggtcagacagaagaagagcaaactgttactggactcactgcatgcatggtggagaaaaatgccacgctatccaaaaatccagactgggtgaatggttcagctgtgtactgaatcagtggggcgcactctgttattacagtgttgacggtcaggcggaggcagacataatgccgcggaaaaagccctttgtgccatctgtctcggaaataaaaactttatgttcttcggcggcgagcgcagtgcactgttgtatgggcttatcggcacttgccttctgaacgacattgatccggaagcgtatctgcgccatatcctgagcgtactgccggaataaccttccaaccgtattgatgaactcctgccatggaacgtagttctcaccaataaataagcatcaatatgattctccattaacgcttaccttttctcaggctatttttgcttttttttgcttttccccgccactttatggtgattatcacatcaatatacatcgatagatattaacgtaactgaaatgaggtgaagcatgaaatttgaacgccatcatgaaatattgaaacgactcagtaaattcggttctgtaaaagtatccgatctgtccaatagcctcaatgtaacgaaagaaactattcgatcagatcttaatgaacttgccaggcttggctatctgactcgatgtcatggcggtgcttttatcgtcctagactcgcttgatactattgcgaaaaatgaaatcgcttatgcgcttgaaaattatgatacagcccagggaataaaaaaaggccactcaactatgaaaagtcaagtatgcgttattggttcgtttaatgttgatatcatcagttatttgccgaggcttcccactatcggagaatcgcttctggcaagtaattttatattttcaccggggggaaaaggctgtaaccaagcgctggcagcaagctttgccgatactgatgtttatttcataacaaaagtaggtacagatcactttagtgattatgcgatcaactttatgaattcgtctaagatttataaaagtataatttatcaaacgaaagaaacgcaaaccggaactgccacgatccttgttaatgaaggtactggcgataatgttattgcgatctatcccggtgccaacatgacaatgtcgtccgatgaaataactattcagaaagaagcgattattaattctgatgtcatacttctgcagctcgaaacaaattataccgctctgcaacaagcgatcacattggcgcaaaaaaacagtatcccggtcattattaacccggcaccctataatgatatcgtcaacgaacttattcaggatgttgattatatcacccccaatgaaacagaagctggtttactgtccggcatagacgtacacgatcttgaatcagctaaacgagctgcagaagctatccacaataaaggggtaaaaaacacggttatcacgctcggtagcaagggctcgctcgcatttgatggcaaaaaattcattcattcgccagcgtttccagcggtcgttaaaaatacggcaggagccggggatgcttttaacggcgctctggcatcaggacttgcgaaaggaaaatcactggaatcagcactgtgttatgccagcgcctttgcatccctagcggtggagacaagcaatgcttccgacatgcctgaacatgaatctgtgatacatcgaattcagagtatacattatcagcaaactatttttacgcattaagaagggacagagaatgaataacaccaaaaaatcactaaaagtgctctttattggggaatcctggcatattcatatgattcattcaaaaggatatgacagttttacctcaagtaaatatgaagaaggtgcgacctggttactccaatgtctgaaaaatagtcaggtagatgtcacctatatgccagcacatacggtacaaattgccttccctgaagatgtggcacagttagaacaatatgatgccatcgttattagtgatattggtagtaatactttcctgctacaaaatgatactttttatcaacttcgcataaaaccaaacgctctcgaactgattaaagaatatgtgaataacggtggtgggttattgatgattggcggctatctctcattcatgggaattgaagcaaaagccaattataaaaatacagttctggctgatgtgctcccggttacgatgttagatggtgacgatcgtgtcgaaaaaccagagggtgttattgcacagccatcacaacctgaacatccagttattaaagggttctctgaatatccttttttcctaggttataaccgggcgatcgctaaagaaaatgctgaggtggtattaacaataaacaacgatccattactggtctttggtaactatcacaacgggaaaatagcctgctttatgagtgactgttcaccgcactggggtacacagcagtttatgtcctggccgttctataccgcgttgtgggtaaatatactgactcatattgcaagataataataatggggtaactccagttaccccatttactataatagaaggattgatgtatgaaaaagaataagtactcaactcccttatggatgcttgccacgattcttgcgggtatgctctcccctatgcaatcagcggtgaatggtcaattaggtcactggttacaggatggtaatgcatgcgcagttatctcctttgccagtggtttagtcgtgatgttttttattattatggcgcgaaaagaaacccggcaacaatttgcggcaattccttctctgattaaaaaccgaaaagttcctctctggaactggtttgccggtctctgtggagcgatggtggtattttctgaaggcgcatcagccagcgcactcggggtcgcaacgtttcaaaccgcactgatctccgcgctattgctgtctggtttactttgcgatcgctttggtatcggtgtcgacgagaaaaaatactttaccccttatcgcatcatcggtgcattatttgcggttattgctacgatttttgttgtgtcaccgcagtggcattctacctctttcatcttacttgccattcttccgttcttagctggtttgcttgcaggatggcagcccgctggaaatgcaaaagtagctgaagctacgggatccatgctggtttcaatcacctggaatttcatcgttggattttgtgttttaggcacagcgctagctattcgtgtcgcattagggcacgtcactgttcaattaccagatgtctggtggatgtatcttggcggcccgcttggactaatgtctatcggtttaatggccattttggtcagaggtctggggttactgatgctgggggttgcttcaacggcgggccagttactgggatcagtattgattgacgtattaattccatcgctgggcaataccgtttatctggtcacgatcatcggaacactgtttgcactggtcggtgcaattgttaccactattccggaatacagaacctcgaaaacaatgaagaaaatggaggtataatcatgaaagattatctacaaactgtgacgggccccgtcgcccgtgaagatatggggctaacacttcctcatgaacatctgttcaacgatctttcctctgttgtggatgctccttgctatcctttttcacaacggcttgttgataaaaaagtcacggcagaaatccagtgggcattaaaacacgatccttattgctgcgctgataatatggaccgcaaacctattgaagatgtgatcttcgaaattaataactttatctcgctcggtggtcgcaccattgttgatgccacagggtctgagtctatcggacgagatgcgcaggcattacgagaagtcgcattaaaaacaggtctgaatattgttgcttcctccggtccctacctggaaaaatttgaaagccagagaattcataaaacggttgatgaactggcggcaacgatcgataaagaattgaatcaagggattggcgatacggatattcgtgccggaatgatcggtgaaataggtgtctcaccgacatttaccgaagccgagcataacagcttgcgggctgcctcgctggcacagattaacaatcctcatgtggcgatgaatattcacatgccgggctggcttcgtcgcggtgatgaagtactcgacattgtgttaggtgaaatgggcgtctcgccaaataaagtctctctcgcacactcggatccgtcaggaaaagacgtggcgtatcagcggaaaatgcttgataagggtgtctggctggaattcgacatgattggcctagacattaccttcccgaaagagggaatagcgccaggggtgcaggagactgccgatgccgtcgctcatctcattgagttgggatacgccgatcagcttgttctcagccacgatgtcttccttaaacaaatgtgggctaaaaatggcggtaatggctggggatttgttccagatgtttttctggcctatctggcggagcgcggcgtcgataaaacgatcctcaaaaaactctgtatcgataatcccggacgattattgaccgcataaaaccattatcccccggcacactgcgccgggggatgtcaattaataccccgccgttaaatcatccaccaagcgcgagtcggatgcgccgtacaactcaccatccgacccaaccataatgctttgcgtgctgcccatcgcctcattcagcgccactttctgaccttttgcttccagcagcttgagcgtatccggactaaacccttttcaacacgcagctagtccggcaaccactgatggtggaaacgaggcgcattggtcgcttcggcaacattcattccacaattgatgctgttcaccaccatttgcagcacggtagtgatgattcagctaccggtaacaaagtgagtacataaaggccatactgtcacgaacagtgcaaaagtggctcttccgcaacctaggtgaagattttcatgccagtggactcattaccctccgcctaagtagttcaaatccggctcgaccatacatctggcgtatcagcaccttcaggcgatttacatgaccttcgacaacaccattactccagcgactgctgattgcctcacatatagccgcagcatcagcttccatccccgcagctacgcaccgaagttctgctgagccgctttcgtgaactcgagtgaaccagctgcttagctgtgatttattttaggttttcagaatacggtagaactcgagtaccagttgctgtgctattttcaactccggttctttttcacacatcagactaataaatcgggatgcataattttcttcgcccctgattattctccagggcatcaaccagcggcttacccgggacactgaaggaagtcttgcggcagtagtaaccggtgggttccagcctttacgccatttggcaacagtatccctgacgatggtttcactgcctgtccccccctgggccaccatttcccgccatatccggctggcattataattaccactttctcgttgctcttttaaccactccctccatgggtccagaagccctcgctttggaggccgggttgacatttcagggaatgttcctgaacgcacccagcgactgactgtcactcgcgacaggcctgtaatacgggatatttccctgaaactacatcccttgttatgcagggccataacctctgtccaatgctgatgccgttttttgcgggtttgctgtttaaggcgttccggacgacggagcgatgctacaggcacagatatttctggctcaggtgatttattcagtgataactctctgacaacaagacgtatcagaggcatatgtctgtacatcattcgttcaggctcatcaccaatactttttagcaggtgccatcgatcggccacctgtctggcctgaggtgcaccttcacgtgctgctgtcgcatagactccactgcgatcacgcgagacaacctgtatttccggatattttctgaaccaggtcgccagcgtacgctgatcacggccgggaagcaggacgaggggacggtgagtatcaagattgactattaacataccgcagcagtggccccgatgccacgcccactcatcaataccgacatgaggcgcgcctgactgtttcgtctccggggtattgataaccctgcgaagaagagtatcagcactgcaacggagacccgctgccgttgcagcccgttttccagcctcacctccagctattaatcccagttgacgttgtaaattttgtaacgcctgtgaagactgctggtgtgaaccggcgaagggagcaagcgactcggcaaaaattttacgttaacaagccgggttacggcagtaccagtggcggacggaaaatacaagccatagcgtctgccctgagcagggtagatgctgtatccggcgccgacgacaactatgaacagagtcgctacgcttaaagcattcaggacattgtgctgttttgcgttttccgtggagatggagggttataccgtcagagctaataatttgtcgactgcatcgccatccgcaaggtaactgtagaagtgtcttaagagagtgcattgcgttgcccataacttaaaacagcttagatccttgttcgccagaaagtttcatccattttcttccacccaggttgcggaagaaccacttttcatccgtcgttgacagatgtgaagtatgcgggagaaaaagtgaatatctaactgtaataactcagaccggtacgagtacccgggacgtctacaatcattcagggcaaagtgctaaaatttctctatcccgggatgcccctaccaacgcagcactcccggagatatcattacagctctacaactgatttccgcgactgaaccgctcagttcctatccttccagttgccttcctgcagccccccctccctgctgtataccccggtaccacaacgcgggcagcacttttctccttcataatcttcgtcacacatcacacaaaaccactttctcaccttcaccgtataatccggaaccgtcataccctgcagatgcaaacgacgggcctctttctctgccgggtcaagccaggtgcatcgcagcaggattttctcagcgacagtcatctggtcatgttcaaaccacggtggttgtccgtcattgccccgctgaagtgttaacgggcatccacaggacacacagcacaaaacgtcctggcggttgtgcttcgctgcttctttcgccgtaacaaaatggcctttgctgtcattcgccatataacagttcagaattcgcatatttcctcctgagttgtccggggaatactgaatcctccggtctggcagtgtgtgcagtaccgctccccataataatcgtggtgacattgtctgcagtgccagctggctttacgcaccacgggtaaggcatccggtacgaattgctgcagacgtttaatcaactgtatttctctgcgctccggcctgacataagggcactgttgaccgtgctctgtcagcctgtcgtcagtgtgttcaaaccagggaagttcagtgtcgtattgcggatggtatctgagtgcactgccacacaagtggcaggtgtagtgagcataaggtgcggcctgtacagtacgggcgcccgtcagacgtccgttgctatcaagagcgagaaaggattttgcgtacatagtatatgttccttaccgtcagacgacacgcaggcaacagccgtcccggtacgggcagcgtggtcaggtgtgaatggcggtttcagttcagtctcataagggaaaatcagtgtggtggccatgaacacgtcatcacactgaagtcagataactcgtctgtctggctcagccacgactgcagccaaagttgcgctcaccggtgcagtgagctttggtatgctccttcgccagatagtcagcacgttccagcacttgctgaaagccggtgtcatcattacgcgccagccacaccgccggccaggccggaaaatgcaccagcgtggcatggcatccggcatccacccccagggcactgcaccaggcctgttcaatcattccggccagtgatcccggagcgcggtaatcaccggcacgacaccaggtatcccggttgaccagcagcatcagatgatagtgttttttacctttgcactccccaaactcccgggcccagacgtaatgcagagtggtgggatgcacgcgtttaccttcccgatgcttacgtttctggtaagcgtcgattcgggctttcagggcattgatgaagcgggatatcacagctgcgtccgttgctgccggtacatccgggaaacgcaggtcaacccgcaatgccgtcaggcggggatgaacattcagtgcgtgccgcactgtctcacgaatacgttgctgccagaaggggttgtatttgtaggtcatggttaaatctccgtatggttcatacggaatagccacgtcgtaaaaaatgcgcagagtccctgaagtgacctccggcagggcactgtctcaggcactctgtgataacccgaacggtcgtctccggactgacggttgaattttcagcgttgtttttttaatgtaaaaaaccggttacgggtaaggctgtgaggagggagtgatggtgatacgcaaaaagaagtgcagggactgtggaaacgcgattactcataatacagtgtgttgcccgtattgtggttctgtcgaccccttcggctattaccggaatacagaccgtatcgttaccatactgctggcactgattattgtggtcctgctgactactgtcagcgtcagtgtgtatatactgtgtagctggtgagataacggttcatgtatcccctgagctgacagtgtaccgggtatattaagcgtaaccgacaggttctccttcataccatattaaatttttccaggtattgccgctgccttatttcgtcccatacaggaaaactcgtctgggtttctgacaaatacgcgaaactcacagcccctcaatatcaaccacacgccgtaagccggtaatacctgaaaatcagtctattaccgcccgcgcctccgttaccgaacgctcaggtgacaagactgaagccagcacgcactcgtaaaatttgcggtcagttctgccagccggttgtcaacggcagagttaaaggcttccagctccgcaagggtaagtttataacgcgtgtgggaattcacttttcccgcgtctcctgacgtattacgggctgccacttacctggtgtcccgcaatacagccttagtgttccgttatcggggatccggacgcaccgcaacaaccggggaagtatttctggttagagcagtgtcaagagggatttctcagcccctcactcaccggctcagtctcagggcaggagcattaatacgctcagttcatgtcttatacaggaatgggcatagggggagctggcgtgtcactgctgattttacgcatcagcgttcatgtatttgcactctgatacagaatgcttcacagcgctctgttaccggagagatttactctcttaggttattctggcaaatcctttacgttactctctgatgacttcttatatttataataccaatcagacaaccttatcccatcggtgatatcagtctcctgctcgccaggaacgggctgactcactgtaaccacctccgaaaacaactctgcaattatcagaacgcctgcttctctccctgtcctcacgaaaactatcccctctttatcgcgcgtgcgtgcggaagcatcttttcgcacccccgttactttattcgtaccccttataatggggtgttagccagccagacccggcatgattactgcccccagtcgtccatgatccggggggtgatgtcaccgggtctggtggggcgctggtaaccgctaataggggtcaggtcaggcacttttgccgggaccgtctgtaacgtggatgccggtacctgctccccgtggttatctggttaacccatatacaagggagacagaatgaccgaatccagcgattacgaatccgtccaggtctttatcggcgttgatgtcggtaaagatacgcatcacgctgtagccattaatcgttcaggtaaacgcctgttcgataaagcattacccaacgacgaaaacaaactcaggtcgctaatatctgacctgaaacaacatggtcagatactgctggttgttgatcagccagctaccatcggtgcgttacctgtcgccgttgcccgctcagaaggagtccttgtcggatacctccctggactggccatgcgccgcatagccgacttacacgccggtgaagctaaaactgatgctcgtgacgctgccatcattgccgaagctgcccgtaccctgcctcacgcgctacgcacgctgaaactggctgacgagcaaatcgccgaactctccatgctctgcggcttcgatgatgatcttgccgcacagacaacgcaggccagcaaccgtatccgcggccttctgacccagatacatccggcactggagcgcgttctcggtccgagacttgatcacccggcggtactcgatcttctccagcgatatccctcaccagaaaaactcgcttcgctgggtgagaagaagctggcagcccagctctgcaaacttgcgcctcgtctgggtaaacgccttgcagcagacatagctcaggcactggccgaacaaaccgtcgtcgttcccggcacgaatgccgctgccgtagtactgccacgtctggcactccagctcatcacgctgcgtaagcaaagagacgaggtggcgcttgcggtagaacagcgagttcttgctcaccctctttacccggtcctgaccagtatgcccggagtcggtgtcaggaccgcagccagactcctcaccgaggtcgcctgccgcgccttcgcctctgtcgcacatctcgctgcttatgctggccttgcgccggtaactcggcgatccggctcgtcaatacgcggtgagcatccctcgcgacggggtaataaagctctcaaacgggcgttgttcctgtcggccttcgccgcgctcagggatccgctctccagggcttactacacccgcaaaatgagtcagggaaaacgacacaatcaggcgcttatcgccctggcgagacgacgctgcgacgttctgttcgccatgatgcgcgacgggactttttataccccgcaggcgtcataacatgcttgacaacttaataggggcaccccccgggattccgctacggctctgccatcgcaatccccccgtttatctccggacagccagattcccgattattttttacgtttctccccggttgttatgccggtgaaggtggcgcgctgttttcatgaccacaccggctggtttaacaacatccggaggaacattctcatggctaccccagtttcgctgatggatgaccagatggtcgacatggcgtttatcactcaactgaccggcttaaccgataagtggttttacaaactcatcaaagttgggggctttcctgcccccatcaaaatggggcgcagctcccgctggctgaaaagtgaagtggaagcctggctgcaggcgcgtattgcacagtcccgtccgtaatttttaaccactaacccttcgcccaaagcagacgcaatctccggcctgccggcggcgctctgctgcctgttatcccccgtgaggaatatgaaaatgaaacaacagtatcagacccgttacgagctgctccatgaaaactaccagaaatggctgaccggcttcacccggcacgccgtatcatggggcgtgtgtcatccgaatatctactatttccataatctgacgcccgggtgggtgtcattcaatggcgaaaaaccggagattgccatcgttccccagagtctgcaccggctgatttatggtccggacaaacggagctccccgtccctggatgatgatctggtggtgaatttatgcaccagcgaacacctgctgattcatcatccgatgctggaagggatcctgctgtctgaatgtgagcgcctgaagcaacattctctggcaaacaaactgatcagcctcttccgtcagtttggcggcacggagttacgtctcaaactggtctggctctgctggcttgacttaatgaccggaaacagccttgacgactggacgaaaaacctgaaacacaaatcagaaaaagatctggagcaatggatcattgcacgtcagggtcagagtgaaccactgacaaatctgatggatcagtacgtgcttatggcataccgtacatcggttgatgccgctcacagttgatgtctgataaccacagggctggcagcagaaaaccagccctgtggtaaaatacagtaatagcggcgtacatcaggcacgccgctcactcgtccacagatcatatacgtcattatactgcgcgataacggagggcttcagcacccggtcatttctgagcgggtatgaataccattgatgatgcgaagcagccacgggcagaaacgttcttcacaaccaggtgcctccatcttcactgcaggctgaatgtgccggcttgttatccaccagaaatggtatgctccggtacatgcataccccggagactataaacgcactgaatcatagcctcccacctcagcaggaggcagtcagctttcaggcggaaaaacgttgcagttaaagatcgtgagaatcgctgtttcgttgcatagcaacccgaacagttgtagttgaaacattttacctgcatcagcacatggtcaggcgccgtctgtatggcgtggaatactgatgtttcggctgatggcaagcctcattctctgtggaaacaggggcgcgcattagcttctcaaccagagagtgtcacaaagacaaatattgctgaaaatcgcattcatcgttcaggcgtgaatgcccggagacaaaagccgctgtccgcacagcccccctctgatctgaacaaaaagcatacacacaacaggctcacctgaccccgaaaaaccataacttcagcaataccagtgacaccagcacgttacctcagtgccacatcttcagaccgcgatcaatctgaaatgtgactatcggggcaatatcccagttttgtggtacacgataaccagaaaacatcccctgaaccgccagccagaaagaccggccacaaaagggttaagctgaaatcgtttatggattacatcgacatatgcctggcagagaatgtccggaatgacgaggttatctttgcggagattaaggcaatgtgtcaacgacggatgaaaagtgatccacttatatctccaccaacggcccaatattgatccaccgttttactcaggattagcttctgctataaccccggcttttcgtttctgtctgagtcgatagctttctcctttgatttgaacgacatgtgagtggtgtaagatacggtccagcatcgctgaggtcagtgctgcatcaccggcgaacgtttgatcccactgcccgaacggcagattggatgtcaggatcattgcgctcttttcgtaacgtttagcaatgacctggaagaacagttttgcttcttcctgactgaacggcagatagcctatttcatcaatgatgagcaggcggggggccattactccacgctgaagcgtcgttttataacggccctgacgttgttccgtagataactgaagtaacagatctgctgctgttgtgaagcgaactttgatacctgcacggacggcttcatagcccatcgctattgccagatgggttttccccacacctgatggccccagtaatacgatattttcattacgttctatgaagctgagtgagcgtaacgactggagttgcttctgcggtgctccggtggcgaatgtgaagtcatactcttcgaacgttttcaccgccgggaaggctgccattcgggtatacatcgcctgtttacgttgatgacgtgccagtttttcttcatgaagcagatgctccaggaagtccatataactccattcctggtctactgcctgttgtgacagcgcaggcgctgcgcttataaggctttccagttgcaactgcccggcgagcgccatcagtcgttgatgttgcagttccatcatcacgccactcctctgcagaatgagtcgtagatggagagtggatgatgcagggggtgtttgtcgaagttcaccagattttcactaggatgcacgtcatactcttttttctccggaggcagtgccagcatggactgctgctcttcgagccagcgatcgcagggacgggcctggattgtttcatgctttcgttggttagcgacatcgtgcagccagcgcagaccgtggcggttggctgtttcaacatcgacagtgatccccatcgggcgcaggcgagtcattagtgggatgtaaaaactgttacgggtgtactgcaccatccgttccaccttacctttagtctgtgccctgaaggggcgacacagtcggggagagaagcccatctccttgccgaactgccacagcgaaggatggaaccggtgctgaccggtctgatatgcgtcacgttgcagaaccacagttttcatattgtcatacaacacttcgcgcggcacaccaccaaagaagcggaacgcattacgatggcaggtttccagcgtgtcataacgcatattgtcagtgaattcgatgtacaacattcggctgtatccgagaacagcaacgaacacgtgaagcggtgagcggccattacgcatagtgccccagtcaacctgcatctgtcgtccgggttcagtttcgaaccgaacggcaggctcctgctcctgaggaaccgagagagaacgaatgaatcccctgagaatggtcattccgccacgatatccctggtctctgatctcgcgagcgattaccgttgccgggattttgtaaggatgagcatcggcgatgcgttgacgaatataatcccggtattcatccaggagtgaagcaacagcaggtcgcggcgtatattttggcggctcagattttgcctgcaaataacgtttaaccgtattgcgggagatccccagttctctggcaatcgcccggctactcattccctgcttgtgcaggattttaatttccataactgtctcaaaagtgaccataagctctcctgaatcaggagagcagattaccccctggatctgatttcaggcgttgggtgtggatcactattgcaccgttcgtgacacaatgggccatacgggccgacgttccatgccgcgttactacattcagcccggacgtaaaatgcgcccgtcaaaaagaacggttcgcttcgaaactcagccaggataccacctctccgccacacccgggaagaagttgatatggtggttgccggacaacagagctcctggattgactgctgcatcactcaaccacgctgaatatcaaaggagagcgttaccggttaaaagagaaacgtaaagctgtggtgatgacccaaaacgcaacgcctgtcagtgaggatgaaatggtgaaaagcggacagcaccagtaacggaagtatcttagcgggtacgaaaatggcaggatcgtgacattgacagaatatctcctgatcatcctgaatgactgcagttgctgtggaaaagtaagctgtctccacccacggcacgacttaacaggcattccgtaactcccccagacttactatgacgcattatcggtgcacttaaaaccgcagaccgcattgcgggtgttactgcatgacagtctgaccgtattgtgagatgtcggcaggaaccgatgtccgcgcaggggggaacttcctgcagtacctgacgcttcaaatagtattaaccgtagggcgttgttggttccggatcgcggaaatgggagcacaggtctgctacggggtgtacctctgacagtaaatccggctcgctcatctgacagcctctctcccggaaaagaccaaaaatgagatcgtctcctcaacagcagagaagaggtcttgacagacaggctacattgcatacgatttatgaagaaaaagacagcaaatatggaggttatagcggagaacaccctacgaaattcctatgaaaaacgattgaaaaaaatatcaaattcgattcgtttttatatgctttttgggaacgtggcgatgacgaactgttgcatgtgcagaggagaatgcacccggaagcaccagaatcatccagaaaggcagaacgattacgcatcaaaccaggagacagcaatatcaaggtaatacactgatttaaaatgaatttacagcaatacgtgaaaacattttttacttaaaggagacagatgcgctgaagagagtgcaggtatttttatataaaaatgagaagattacgggatatatatccggcacactatgaccggagaataccagtcaggcttaaaaagacaataaatacagtgagttaaatacacagagaaaacgaaaacgtagtatcagagggtacatcttacaacagagactgaatttccggtttttcataaccggccattccggaaagtgcaggcggcccggagctcttctgacgccagtacctgccagattgttctgtacattctgtacatcatgtacggaggtttttgtttgctttcttaaaatctgcaaatgtgggaagagcaggtgaggtgtattgtgggaaaggaactggatgatatctgcaccagctgtccgtatatcgatgctataaaacggcacaaacaacagctcggtgccatagaggaatatacacagtggttaaaaaaagaaccacgggcatcttatttttttctgttccggctgtatacccgcattcacaatacatttttccccaaaaagcaacaactcccgttcactcccggtggcactcactgcccggaacctgatgtcacccttcgggacttaacgctttccccgggctaccacagtgattatgcccctcaacccattccggagatggacagttctgctgttgttcccccaactaatgaaaacacctcgcctccggaagatactcccgacaacactccggccggaggcaataccggacaagcggaaaagaccagaaactcaggactcacacccattcctgaaaaacgttcaggaatgcccccggaacatctgcggtttgccacagggtttccaccgcaaccgaagattgccggtcccaaaggaaagccgatgcgcaccgtgcatccggataaaatctaccgtgaaattatatggttctgctccggttacctgcggaaatccggaccagaggctacgaggacgatcatcaactcaatattctgtgaatgggccagcatcttcaatgattactcctcccccttttcgtgggtggacagcagggacagtgaacagtgtgactggttatggaacgccatgcaggtccggtgtgtgggaaccccgctgaatccccttaccccggagcagaaatactggttcgcctgcgccacgtttgataactgggaaggctggaatgagcaacaggtacagtttttactggaaagtaatcccagacggaacagagcgaagtttacgcaggcctccttccaggcccccaggattcagcataaagcgattcttcttgatganctgaaaagtgcccgggagcaacaaaaaaggcgtgatgaacgtgctgatggttccgtnccgctgaaactgtccggaaaaatccacaaacagcntgaaagtattgcccgaagtcgtggtgtccncccaaaaaaactgntgaatgaaatgattgagcnggcgtaccaggantttgtggcaaatgagcancacaagacncngagttaangacngcagggcctccggttaccnattctgcagcatacacaacgaatgtntccggctcttacctgtgngggccgcacnaaanttanncattgagnatgagtggntaatcccggntgagantntcccggtttttacactattcactnaaggtgngncatatcattcagtctctctgaattcttcatttcagtaacttcagctaccttcgtttcatctcccccacgaaccggggccgcancttgttgtntcaataccaaattgttggtcattactgtcntgtntcactggcgctgncaagtgaactgaaatccgcaccttaatattctgactggctgcgtacattcatggcatgaagcggccggancggctganctgaaggtccgttgtgagcgaacagcggacattcactacacatggttcaaacatgaaccggagctttattgtctagctgtcagtgtactgcgatttacccgctcggntgtccagaaaatcggtctgaaatccagtcattaaagggccttagcctgacattaagcaacttggtaggcggatagataatagaaataggaatgcgcaggtctgtcatgttgcctagaacggtgacaagctgtccggtgcgaaatcattccggcagcgacaggctcatgtgtcagcccgacgcccagaccgtcaacgagcatgtggatctgcgaggcgttatcgttcgcagcgatgttaaaacgaacaatctgctcatcttctagaagcacaagtgctttaatgacattaaggcggtctatatgttgcattacagacttcctattgatctttacctgaggctgaagcaaccacgttaatccgactatttttcgattgcaccatccactatcaccatcgatcttccctgagcacaacgttcaactctcccgcgtacgccgtatacctgcgcaaggctctctgcatggatcaccgtttgcgggtcgccgctgtcgataagtttcccctctttcagcatgatgacctgggcggcatgccgcagtgcgatattgatatcgtgtaagacgaccagcgtaaccatattgcgtcttcgcgtttcgcgcgatacaacatccatcacatggaactgataattgagatccagcgcgctcagtggttcatccagcaataataatgcggggcggcgaataagcgactgtgcaagccccaccagctgcttctgaccgccggacaggctatcgaggtagttcattgccagatgtgcgatgcctagctcttcgagcagcgctatagcctgcgcctgattttgcccggcgccggaggcgcgctgggcgacaaccaccgactccagcacctgtaaatgcacgccctgcggcagggactgcggcaggaacacaactttttcagcccgacgagcaaacggcagcgataagagattctcttcattcagccaggcttcgccactggcgcgatttagcccggccagggcgcgcagtagcgttgatttaccgcagccattaggccccagcagtacagtgacttcgccgcgcggcagcgtagaaatcgacagatgctcaataatccgccgtttgccgtaaccggcgcacagcgcattaatcgtaagcccgctcatgacatactccctcgatgacgcattacaatgctcagaaagaacggaacgcctaccagcgaggtaacaattcctaccggtaaaatgacaccgggaatgatgttcttcgacgctaccgaggccagcgatagcaccagcccaccgataaggatgcttccgggcaaataaaagcgatgatcttctcccagcaacaggcgngaaatatgcggtgcaaccaggccaataaagccaattggccccacaaacgcaaccgaaagggccgccagcaggctgatgcgcagcagggaacccaggcgcaaacggcgaacatcaatgccaaaactcatcgcccgctcttcgccgaggcgtagctcggtaagctgccaggcacgacgcagcgaccagggtaaaacaatcgccatcgccgccgccagcaccgccagtttctcccatgatgcgcgagccaggctgcccatcgtccagaacaccaggccctgcaaagtatcttcatcggcgacaaactgcataatggacaccagcgcattgaaggtaaacaccagcgcaatcccaaacagcacaacgcccgacgtcggcacgcgcgtccagcgggtcagactatcgagcagcagggcggacaggagcgcaaaaagaaaagcgtttgccggtataaacccgctttcgggaacgccgggaataccgatgcccagaacaatcgccagcgctgcgccaaaggccgccgccgacgaaacgccaagcgtaaacgggctggcgagggagttattcagaatagtttgcatctctgccccggccaaacccagcgccattcctaccaggagcgccatcagcgcatagggcaaacggatgtcccaaacgataacccgcatgccgttagtcgccccggacggatgcatcaaagtctttatcagcgaatgtaaagggagccctgaggggccgagggtgaaatcgagcagcagcgaagcaatgatagcgataaaaataaccgccagtattaccagacgctggcgaaaaagctggcgatagcggttctcgaccgacagcgtactttccaatacagtcatggtttttcacagcctccgttagcgcggcggattgagcacatcgctcatctgcgcatcgcttaacgtcaggccaaagaactgccgataaaactcacgcgtctntttgcgtatatccnnatcagcaaatcnnncagganaaagngttttcnccagccnnaaaaattgcagnnccnnttcncngntttcnngnnncnncnnnannntncnttnngnntnannnnaannnnnnnnnnnannnncnnnnncnnnnntnnccnnnnnngnnnannnnnnanngnnnncnnnnnnnnnntnntnnnnnnnnnnnnnancnncngnntngnnnnnnnnantttnnncnnnnnnnnnnnnnccnnanngntttnnnnnnnnnnnncnnannnantttnnnnnnnnnttttnnnnnnnnnnnngnnnanncnnnnnnnnnttnnnnnnggnnnnncngnnnnnnnnnnnngnntnnccnnnnnnnnnnnnnnnnnnnnnnnnnnnnnnnnnnnnnnnnnnntnnngnnnncnnnnnnnnnggnnnnnnnnnnnnnnnnnnnnnnnnnnnnnnnnnnnnnnntttnnnnnnnnnnnnnnnccnnnnnnnnnnnnnnntnnnnnnnnnnnnnnnnnnnnnnncnnnnnnnnnnnnnnnnnnannnnnnnnnnnnnnnnccnnnnnnnntnnnnnnnnnnnnnnnnnnnnnnnnnnnnnnnnnnnnnnnnnaaannnnnnnnnnnccccagcgcgataatctgttcgggattgatttcatgcccgctgtttacgctaactgctgcgactttctctatgcgcggcaggctctggcgaaacagggggatcctttttgcaatcatcgaggttccgacaatgttatcgccgtaccccagcatggcaataatggtattttgcgccggccacggtgacgcgatacgcacctccttgtgcgtattttctgcgtgcaggctggccgccagcagcagcgccagcagcggaaataaacgggagagtttcatcatttatccatcagaaatcgaaggtgacggatgcacgcacttcgcggccgccgccgataaacgcacttggggaaccgttatcgccatcggtacccgatgggaagatagaagcccagtaatgtttatcaaacacgttgtttaccaccacgcggaaagtggttgggacgttgctcactttcgtggtgtaacgcgttcccaaatcccatgtggtatagctgctggcgtaagaggtgttggtatcgttcgccgcgcgtttgcccgtataatggacgttagcgctgtaaacccattccggtatggacggcaaactgtattccgccaacagattggcctgcactttcggcacgccgacaacctgtttattgctggttgaggcattcgccgtatctttcagtttcgggtcgaggaaggtcacgccgctgtaaatattcagcccctgccacacattcccggcagcggttaactcaaggccgttgttaacctggttaccctgctctttatacacgttatccgtatcaagataggcaaacggacgttccagtcggaacagcgcggcgcctagattcatctcgccgatgtccgattttagccccacttcatactgcttgctgcgatacgggtttagcgtttgaccggcattttttacgctctcatccgtcggtgcggtaccgccctgctccagcgaatcggcatagctaacgtaggccattgtgttaggggtaattttatacatcagcgcggcgttcggacttaaaccattttcatcaacctggttcgtttgattaccgtgcttatcgtagtttttagtctgcagccagctctggctgagatagaacattgccgaccactgcggcgtaaatgtcaccgtatcgccgagcgtaacgctctgctgagtatttacgctggagcggtatcgcggcccgccggtgcggattttgccatcgccctgctcatctatcgcatccgggtgatacatatttgttgtaccccagctatagctggaacctgttcctttggcactataaagcgaccagacatatcccgtggtagaaagtgacagatcgtggccgatagagccggtatcaatatgaccattcagcccggcggtgttgctcaggacgcgaaaacgtccggcagcggtggaatccttcatcgaacgagagatatcgccctgattgttgagtattttactggaaacactacgcatcgcgcggtcagcctgctgccagcccacgccagcgttcatggaccagtcgtcgttaaagtagtggatcaggcgagtgctgatggtatcggtagtgaggtcgttgcccgcagtgctgagcgccagatttttgtccttcggattcggcgcagacggcagtttgacgttcggcccatagttaaagctaccgacatagcctttctggataaattcgtaatggctggcgtcgagctgtagctgagtgcccggctgaatattccagtcgagcgcaacggaaacgagtttgcgacgcagcgtgctgtcatccacattgccttccccttcctgatcaagcaggttcacgcgatagccaaaccgtttgttttcatcaaaatggccacccagatcggcatggccggtaaacgcactgcggctttgatagcccagcgtcactttacgcagcgtctcttcggttgggcgcttcgccacgaaattaaactgccctgctgggctcgccgggccgtacagcgcgccggtcaaactgttaagcacatccatgcgctcaagcatttccaccggaaacgcggttgttgaaacgatattcagcccgtccagacggctgttggccaccacgctgccctgcatcccccgactttgcggacgcccgacatccattccaccgcgcgcctgcatttgcgtactgggagagtatttcagcatctcgctgacgctttgcgcctgctgattttcaatcatctctttagtaacagtggtgctggaatatggtgtttcgatccaggatttcgttcccagcgggccgacatctatatcgttcgttttgaaaccggcaccggcggcagaatcggtggtgtcggcggcggtgttgcccgtgacaatcatttcatcttcagaagtagacgaggcatgagcatgaagcggtatgaaagacgctaatgctggcaaaagcgcagcgaaagttatttgagttttcatgaatcactgatcgttatgtaaatatttatattacgatcggtgcataggcaaaattatgatccagatcacacgtgaatgtaagttatttacaaattacgctaaccttctgtctccgctctttgcagcataaaagtatggcggcgcgttgttgaaagcaggagcggccgngttgtcagaaagctggtttggacgcaagtaatatataacaactctgattaccgcatactgtcaggacagtatctacttgagcgtccgcctttggcacanagcggactgtcagattagattcagacctgtactcattagctgatacaaatcagccacatatacctgcattcaaaataatttcagaaagatattatctccgtgaatcccccgccacctttccggtgcacggggttttgtcttttttcactgggaatacatgtatgaatccgtctgatgccattgaggcaattgaaaaaccgctctcctccctgccttacccgatttcccgtcacatcctggaacatctgcgcaaactcacccgtcacgaacccgtgcctggcattatgggtaaaagcggggccggtaaatcctcactctgtaatgcactgtttcagggggaggtcaccccggtcagtgcactcatgacagtgcttcccggacatgccgccatccatctgatgacacgcctgcaggacgaactgcgcacggagtctgtccgcactcagacccgtgaacagtttaccggtgcggtggaccggatatttgacacggcggagagtgtctgcattgcctctgttgcacgcacggttctgcgcgccgtccgtgactcggtggtctctgttgcccgcgcggtatggaactggattttcttctgaacccggtggtgatgtaccaggctgttgttacagatttttaactccatgaaaacactatgcaaacgcagccatacccggggtgtccccttgcgttgtgttcctcaagttaatagaatacatcgatcgttactattatattgatcgttataaacgatcgtttgtagtaaatgacctcctccgtggttgtcatgaaaatgcgtctcaggaaggttaaataatgcacgaaaagaacatcgccctgctttgtgatgaagccgaccgacttttgcaactgaacattaatctgctccggcaaatggttgaggagccagatgtgttatctgacagtaagaacgaaaacagactgctttttgataaacagaaagcactgaaaagaattgaggagctggagggcgaacaaatcaaaaccgcccgcagggagatggtgctggctgttgtcggcacgatgaaagcaggcaaatcaaccaccatcaacgccattgtggggcaggaaattctgcctaaccgtaaccgccccatgacctctgtaccgacgctcatccgccacgttcccggaaaaactgagccggttctccatctggaacatattcagcctgtccgcaatttattaatcacactgcaggaaaaactcgccaccccggcaggacagcaggtcgcacagaccctgcagcaaaccggggatacccgcgaactgctggatattctgacggatgatggctggctcaaaaatgaataccacggggaggaggaaatctttaccggactggcatcgttaaacgatctggttcgtcttgctgcggcaatggagactgaatttccttttgatgaatacgcagaagtgcagaaactgccggtgatcgacgtggaattcagccatctggtggggatggatgcatgccagggaacactcacactgctggatacccccggccctaatgaggccggacaaccgcagatggaagtgatgatgcgggatcaactgcagaaagcctctgcggttctggctgtgatggattacacccagatgaactcaaaagcggatgaagacgtccgtaaagagcttaatgccattgctgacgtatcagccggccgcctgtttgtactggtcaataaatttgatgagaaagaccgcaatggcgatggggcagatgccgtacgccagaaagttccggcaatgctgaacagcgatgtgctgcccgcctcccgcgtttatcccggatcctcacgccaggcatacctggctaaccgtgcgcttcatgagttacggaaaaacggaacccttcctgttgatgaagcctgggtcgatgattttgtcagggaagccttcggtcgcatgaaaaaagattacgtctgtaaagacagcgaactggcaactgaaggggcgacagacctgtgggaatgctcacttatcgatcaactgataacggaagtcatactgagttcacactccagagctgcggcactggcggttgattctgccgccgcaaaactgatgcagaatgcagaaaatatcagtgaatacctgtcgttacgccatcaggggctgatgcaaagtattcagtcactgcaggcgcatatcaccagcctgcttgaggatatccgggaaatagcagactgtcaggagcaggtgaccgctgatgtcagaatggccatggaggagatcgatgccagaacccgggaattactgacgggggtctgcacctcactggaagaggagctgaatgactatttcagaagcggtaaacgcaaagaacagcaaatgctggaggaagaaaattcagcgcagccccgggagagaaacgcattcgctttctttcacgatattttcggaaccggaaatcagcatgacaggatgcgggactttgatcccgacagccccgaaataaaattcagtgatcgcagggaagcccttgaactgatgacgcaaatcgaatcgaccgtgaccagcctgcaccgtgaggctgaagcacagttccggcctgagctggagaaaatcgtcagcgggattgaaacaggttttcgtggcacggccctgtacgccacagaaaacattgccggtcgcatcaatacccgcctggaggatgagggctttaccgtaaaaatcagttttccggcagtcagtcagttacaaacccggctcgcggtaaaaacaaatctgagtgcgcttatggaggaaagaacggagaccgtcacccgtcgccgtcggcagagtggtttatggggaaagatttgtggagcgtttggcaccagtgactggggctgggaaacctataaagaggatgtgagccgcagtgttatcaatatcaacaccgtcaggaaggaagttatgtcactgacccgggcatatttcggggagctgcaggcatccattgagcaggatattaaccagcccgtccgccaggaaatcgatgcctttttctgcgcattcagggagaaagttgaacaactgcgtaacacgctgattcagagctctgaagatcataaacgcgatcagcaggcacaggaacggcttaccaggcgacttcaggcattaaatgaaagggttcctgagctcattactgacagtaaggcgctgagggaagagctggagacaatgctgtgacttcaccatttattcaacaaattgctgataaccgggtatgtcaggtactcacctgtcttcctgaaaaatttgtggttgatttcgcaaacggaatcgatgttgcacaggagcatatccgcacggccggagagcgcacgttcttccggcgtttaaaagagggactgaccggcgaaggcgctgcacggcagaatgccatcaatgcttcggttgcacagggccttgaggcgtccctgcgctggctgacggagctgacaacgtcacttgccaccacaaactacgcgattacccgggtaaacgacagggtcagttcactggtcagtgatactgccaggctggcgcattattccgcagatacacgggagcagttactcatcctggccgatcaggttcaccataaactgaatcatcttgaagaaaaactccaccgtgttgaccaggttcagcgggcgcagttacatcttgagcagatattctcatggtggagcgccgggcgatatgcgtcattttcccctgccggacgttgttatgtggcgcttgaagagcttcgctggggcgcgtttggtgatgtgatacgtcagggcgaaacaggccaggttaaccagctactggatattctcagacataaagcattaacgcagatggcacaggagagtggcggtagtgcaaccgtgcgtctgaacactctggactggcttggtggtcagggccgggagcaggcagataacgagtggcatgacgcgattaactggctgggagactggtgcagtgaagagcagcatccggtgatctggtcaaccacgcaggctgcagaacacttaccggttcgcatgcctcgcctctgctctgcagaacgcctctctgaaagtatggtcgatgaaatatttcagaagggggctgcatgagtacagaaatgaaaacggggctggtgctgtccggtggcggggcggtgggcgcttatcaggcgggagtggttaaggcactggcagagtgtggtacacagatcagcatggtttcaggggccagcattggcgcattcaatggtgccattatcgcggcctctcccgatctgtcagaagctgccgtacgcctggaggcgctctgggatcatctggggaataatcaggtgctgtcggtaaaccgattggtttacttttcattgctgaaaaaattgttccaggcaatgaacctctgccagatccccggacgtgcaggagcactgcttacgacgcttcttcgccatatatcgatactcaacgggtttgacaatctgatggctcagccgttgttgtcagatgagcccctgacagcgctgttggatcattatcttgatactgatgctctggcagacgggctaccgctgtatgtgtcgctgtaccccacagaagggggcatgcaggatattattgactgcattcgtgctgaactgggtgccggaaccacgaaaaacgccgtttttcagcatatccagagcctgccccgcggacagcagaaagaggctctgcttgcgtcagccgcgctgcccctgctgttccgtccccgtgaggttcaggggacaatgttcggtgatggtggtatgggaggatggcgaaatatgcagggaaatacccctgtgacgcctctggtcgatgccggatgcaatatggtgattgtgacgcatctgagtgacggttctttatgggatcgccaggcttttccggacaccacaatccttgagatccgtccccggaaaaggctgaaatatgcaggtgatggtgacaacagcggcggtctgctcagtttcacgttggcacataccgacgcctggcgtcagcagggctatgaagacacgatgctgacgatggagcatatccggaaaccgctggcagcacgtcaggtactgtcccggtcagaaacggtgttgcagaaaagtctggagataacggaagaggcagatttggcactgagaaacgcgatggcccggattaaataaagacgccccaaagaaacgccaccgcctgtggtggtgtttttcctggctggtgttattgaaaatattttcagatatatattacctgagagaaagttttacccctcacctgtcaattcactcactggaaatttaattatgcaattacctgtaaagttattaatgagccttatatctctggtcagcgttattgcacgtgccgggaaatataaaaattacatccgggatgaaataaaatactggcgatatacatcatacaaggggggggaatttccggaaggtttcactgatgagaaattttccagcgccatttacaacggaagaatatttacaatgaaacgtttacataccctgatgttatttctggcggttctgtttactggctttaacgtggaagcagcgagcgtgaaacaagcgctcagctgcgacccaaacgcccgggctgaacaacctggagcgtgtccaacaacgtacgagttgtacgaaggtgacgctgcctacaaagctgcgcttgacaaagcattaaaaccggtcggactgagcggcatgttcggtaaaggcgggtatatggatggccctggcggaaacgtaacgccagtaaccattaacggtacagtctggctccagggcgacggttgcaaagccaatacctgcggctgggactttatcgtaacactctataacccaaaaacccatgaagtcgttggctaccgctactttggtttagatgacccggcctacctggtttggttcggcgaaattggcgtgcatgaattcgcgtatctggtgaaaaactacgtagctgcggttaactaatttaaggagtctgtcatgaaaacttttatcaaaactttactcgttgctgtaactattctgttctctgtcttcgctacggcgaaacaagtaaaactgccaaacaacatcaaatacgttaatactacagaggcgttttcctgtactgagattgacggtatgaattgccagacgaagaatccgtttaactataaagataacagctatgttttcgtgcttgaacgtggtggtgcctggtgttacgactacactgtctcggtacttaacctgaaaaccgggaaagcacagatgctcgaatacaaagacaaccagctgtgctcaggtagcaacaaaccgttcttcgaaatcaaaaatggcgtaccgacggtaggagtcatcgacacatccggaaaacctgtcgttgtggctctggacaaacttaaaacctgaggagtaaaccatgcgtttctctgcacattattaatatcaaaggtaaatacagccccagccattgttgccggaaagccgcttaatgcgtggctcgccagtgaaaggcttctcagacaataaacctcattcatttcacccgtcaggccgcgtcttctccgggagacgtggcttttttcatttattacaccagtaaatcttaaccaccgataaggagcaaagtatgcgattagcaagtcgttttggttatgctgcaaaccagatacgtcgtgaccgtccactgacacatgaagagctgatgcaccatgtgccggggattttcggggaagagaaacacacgtcccgaagccagaactatacgtacatccccaccatcaccgtactggaaaatctgcagcgggaaggctttcagccgttcttcgcctgccagacccgtgtgcgcgaccagagccgccgggaatataccaaacatatgctgcgtctgcggcgggccggacagataaccggtcagcatgtgcctgaaattattctgctcaactcccatgacggttcatccagctaccagatgttacccggatattttcgtgccatttgtaccaatggcctggtctgcggtcagtcgctgggagaagtccgggtgccacaccggggaaacgtggtggacagggtcatagaaggtgcttacgaagtggtgggcgtgtttgacctgattgaggaaaagcgtgatgccatgcagtcgctggtcctgccgccaccggcacgccaggcgctggcacaggcggcgctgacttaccgttatggtgatgaacatcagcccgtcaccactaccgacattctgacgccacgacgccgggaggattacggtaaggacctgtggagtgcttatcagaccatccaggagaatatgctgaaaggcgggatttccggtcgcagtgccagaggaaaacgtatccatacccgggccattcacagcatcgataccgacattaagctcaaccgggcgttgtgggtgatggcagaaacgctgctggagagcctgcgctgataccgtttccctgaaagcgcagtcctgttcacggctgtcccttcccccagacattccaccattcatttactttttataaggaataatctcatgacaacctcttcgcataattccaccacaccttctgtttccgtggccgctgcatcagggaataaccagtctcagttggttgccactcccgtccctgatgaacagcgcatcagcttctggccgcagcattttggcctcattccacagtgggtcaccctggagccccgtgtcttcggctggatggaccgtctgtatgaagactactgcggtggtatctggaatctgtacaccctgaacaacggtggcgcatttatggcacccgaaccggatgacgatgatgacgaaacatgggtactgttcaatgccatgaacggtaaccgcgctgaaatgagcccggaagccgccggcattgctgcctgtctgatgacgtacagtcatcacgcctgccgtacggagtgttatgccatgacggttcattattaccgtctgcgggattacgccctgcaacatccggaatacgacgccattatgcgcatcattgactgaaagggggcaggaacaatgcaacagatttcctttctgcccggagagatgacgcccggcgagcgcagtctcattctgcgggccctgaaaaccctggaccgtcatcttcatgaacccggtgtggccttcacctccacccgtgcggcacgggaatggctgattctgaacatggcgggactggagcgtgaagaattccgggtgctatatctgaataaccagaatcagctgattgccggtgaaaccctcttcaccggcaccatcaaccgcacggaagtccatccccgggaagtgattaaatgcgccctgtatcacaatgccgcagccgtggtgctggcacacaatcacccgtccggtgaagtcacacccagtaaggcagaccggcttatcaccgaacgtctggtacaggcactgggcctggtggatatccgggtgccggaccatctgatagtcggtggcagccaggttttctcctttgcggaacacggcctgctttaacccgtcaccgccacaatcacatcacacctgttttcacttttatcttctgtcttcaaaggtatcctattatgaaaattatcacccgtggtgaagccatgcgtattcaccaacaacatccgacatcccgtctttttccgttctgtaccggtaaataccgctggcacggcagtgctgaagcgtataccggtcgtgaagtgcaggatattcccggtgtgctggccgtgtttgctgaacgccgtaaggacagttttggcccgtatgtccgactgatgagcgtcaccctgaactgagtgggaattctgatgagcagaattatcgccaccaccggaccattcttaaccgattttctgtagggattttatcgtgtcagacacactccccgggacaacacttcccgacgacaatcacgaccgcccctggtgggggctaccctgcaccgtgacgccctgtttcggcgcccgtctggtgcaggagggtaaccggttgcattaccttgccgaccgtgccggtatcagaggcctgttcagcgatgcagatgcgtaccacctggaccaggcctttccgttgctgatgaaacaactggagctcatgctcaccagtggtgaactcagcccccgctatcagcataccgtcacgctgtatgcgaaaggactgacctgcgaagccgataccctgggctcctgtggttacgtttatctggctgtttatccgacgcccgaaatgaaaaattaactctccagaatagccttctgctacggcctggtgttttcaccacgcaactttcccatttttatatctgcatatcaggaaaatcttcagtatgaaaacattacctgtattacccgggcaggcggccagttctcgcccgtctcctgttgaaatctggcagatactgctgtcccgactgctggaccagcactacggcctcacactgaatgacacaccgtttgccgatgaacgtgtgattgagcagcatattgaggcaggcatttcactgtgtgatgcggtgaactttctcgtggaaaaatacgcgctggtgcgtaccgaccagccgggattcagcgcctgtacccgctctcagttaataaacagcatcgatatcctccgggctcgcagggcgaccggcctgatgacccgcgacaattacagaacggtaaataacattaccctgggtaagtatccggaggcgaaatgatgacactggaagccgacagcgttaacgtacaggcgctggatatggggcacattgtcgttgacattgatggtgttaatatcactgaactgattaataaggccgctgaaaacggttattcactccgcgtggtggatggccgtgactctaccgaaacaccggcaacttatgccagccctcaccagttgctgtaagacaatgcagtgatacagggtatagtgccattaaccacagaaacagcactgttgtcctgtattaagcaggcaagagaagatgtccttaccctgcgccatctgcagcttctgcaccagaaccggtgaatctcactcaacaggcttcatttcccctgacgccagcctgaatacagctggcgttttcatttataaacagaaaggaaaaccgataataatggaatggacgccccgaccatgaagcaacggtaggatattactgataaaccttccagtggaggtgcgttatggccgttttaacgattagcattgacctgacaaaaaatgaattccaaatccacggtctgggtaggaacagaaaaatctaagctcagaaaacggattaaagtaagcgtcaacggagcaccgtattgacgcttatttattggtgagaactacgttccatggcaggagttcgtcaacacggttggagggccattccggcagtatgctcagaatatggcgcagatacgcttccggatcgataccgttcagacggcaggtgcctgcttttccggcaacaagcaggaatctcagcgctgaagcaggaattagaggtaaaaacgccctaccgggccatgaatcacccggtcattggagtagtaaccaaagcagatttagccagcatggaacaaatatctttggtgaaaagttggttacgggaagctggagcgcacaacgtgttagtaaccagtgcagttaataacaatggagttacagaactttttgccttgctgcatacagaagaaggctgttgttaatttcgattggttctcagatgagaatgatgacggtgatacacagataagaatcaatgagcaatgagggttgccgggcaaccctcattgaataaaacgggaattacttcgcttcgccgtttttcatttcgcccatagctttcagctttttggagatatcgcggcgttctttggagagctcggcatttttgatgatgtaatcgtcaacgcgatcttcatagtcacctttcatgctggcgatgatgccctggattgcttcaacgctcatccctggcttgatgtaatcgctcaggttgtccagcaacaggacgcgcttctggttgtcacggatctttttctcaacgtcctgaatttcacgttgcagtttgttcttacgacggaacagacgaacaaattccagtacgtcctggaatgaaggcttggtagtttccatttttatacccctgataatgtgagagtcggattcgtttaagcaaccgctattcgttagggccaacattactcatagctgccgcagatgacaatgcttttatcccttttcactatcataccctttatccttgctgaatcgaagcagcagcaagatgattctgaagttcaggaattatttgcgcaaggcccggcaaatcagattcgatagcaactcaagctgatgtgccgtttccatgttcagccacacataaccatagattggtgtttccacgactttcagatcatggtggttatcgagcaactgacgcagctcttccacagcatcgttcaatttttccgtattggcaaaaaccggctgcggattaccttcgtacagcgcatgaacaaggctcagcagtatttgctgcatcatgtgctgggtatcacgaagtttttgcgcgttcaataacacgaaatggctggggcgcgtggcccagtatgcattgatttgcaactccagcatacaaaccagattgcgattaatggtctggataccttcatatatcgatttgggaatacgggtttctttgctggcgggcgcaatcagcccacgcattttcacggcatcggtcagcagtttttgtagatggctttccagacgtgggcgttcgagtaagttcggtgagaatgcagattgatagacccgattatactcggtcagacttttcgccagttgaatgcgccagtggatgaacgcccgttgtggccagataccggtaaacaacattgccagtaaagagccgaggatcacatcgccgcttcgccataacgccgtatcaatttcacctgtcggggaacccacaacaattgccagcgtcaccccaatcaataatccttgatacggtttcttgcccagcgccagccaaccgcaaagaaacatcgccgccgcgcaccagactaacatcagcggtaacgaaattaactccagttgcagagcgataagacctaaaatcgaacccaacaccgtaccgccaatacgttcgaaggcacgagggacaacgttcccccagaacgagattggccccataatcaccaccatggtgaccagcggccaggtgctttccgggatagtaaacaggcggataatgagaaaagtgagcaggaatgccagcgcgacccgagtaccatgcacaatgcggtaatggcggtatacccggatttcaaacgggcttaatgacttatcggcacgcacgcagaaactccgtaatgaagattaaaagcgctcataacacatctgtcggccagaaggcgcgcctctgagttatccgacggacataccgggaacagtgtaatttcccggcaggagcgaaaaatttgaaaggcgcatcttactcttttcgctttcaaaaaaagagtggtcttcgcgtcaacacaccgccctgagatgaattagtgatgttttggctgcaccgcaacatacatttcgatatcccagtacccatcttccgcgccattgttcaagtaaacctcgaagcagggctttggtaacatttcataggcactgtcctgcaagaggctattaaagaactgataccagggtttagcaaaatcatcaccgactacacgagccaccgccaccgcatactgaccacctgaaatttctgtcagaatgacgccctcactgttttcggggagcgtaaagttattcggcaccgtcacgacggtgtcgcagcgtaatttttcggcgggtgtttcatctggattgtcgtaatagacagcaacccactccttcggcacaatatttttgctatctatccacatcatcaactgctcaaagcctttctttaccgtctgttcccacgggccaacgagatggaaacctgcaacggtacgtttatcttcctgcttaatctcgtagttcatgacgcccccattaatactgtttttatatgggtcttccccgatcatggtgggaagactcagtacgccatattcagtttcccatagtggaacataactcccagtttaaagcgttcccggtttcggtatcccctggcctttatcctcagcagtctgatcttgctgttcagcgcctccgcatttccattcgagacgcgatgacgcattgcattcagtattccgtataaccgttttttaatggttttcgctgcgtttttcatcatcggcacatcacattcagacgccagcgatatccactgcaaccagtcattcctgcgttctgtgctccaggggcgatcccagatattttttgccagctctttcagtgtccagcactggcttgtctgttgcatctgttcccgcaaccacatcagcttttcctgccgggactcagtcatccatttgtcgctgtactgccacaggaagcgggtacctttggcctgacgacgactttcaacagggaggtgcggatgttcattctggcgggttttatcaaccacttcgcccagttgcttcgccacatggaagcgatcgaaggcgattttctcgaccgcattgggtaaatggatacgcgctgctcttatatagcccgcattcatgtccatcgacagtgttttgatggccaacaactgactgtcagtaagcgaacggagatagctggcaagactctctgtgccacgatcatcggttaatgccagtgcccgcccgtcgcgatcagataccacggttatatacctatgcccttttttaaaggcgacttcgtctacattcatatgacgcactgataaaggctttttaatccgcgacaggcctcgcttaaccgcgcgggtcatgatgccgtcaacggcattccagctaagtttaagttgttttctgaccgcatcaacggtgctgattttaagccatgagagcacgaacgattcgaacagcagagtgtaccgactgccggaacctgcccacggacaggcagagtctggcagccatgctccgggcacaaacgcggggaacatcggcttctactaatgtatgaactggaggtataaggggcgccatttagtgtggtgtggaaagaaaggtttccgcggcggaaggttaatgagtttttcacaattccgattaaaaaggaacctttttcaggggaagggatttaacccctggggggttaaggatgggaagagggtttttctccatataattttttgaatttttaaatatattattttttttcccctttttaatcttccttggttgggaagggaagtgtttaaagaatttccccctctccttttgttcctggtcttccaaaaaatatggaatattaaaagttcaaatctttttttataattcaaacaacataattaaccttaatgaaaaattttgaaagaaggccaatttctttacctttcgaaaaaggactttaaaagccttaaaaagattccccaaaaaaaagaacaaaccctctccttctttgggtcccttttttaatattttgggggttgtgttggaataattaatttaaaatttttaaaaaaaattttttttggcaccaaaattccctcttaaaaaaacacaaaagtgtgtggttttaaaaccaatttcccccaccaaagggacttttatatacagtatagttgcaatattaaaaccacaaggaatgagtgttgattatgcgagcagattcgcactcctgccagtctgctgcaaaagaaaggtcagtccttatggtggaaataatcactcagccgggaaaacatgctgccttccccgacagattccagggtaaccagcggccagtgcgccacctgtttatcacggtcgtaaagttcaatttcccctacccgctgatgggcgctaattggcgcggtgagttctttaccatcaagggtatatttggctttgatatgtggaatttcggctttcggtagcaccatccagaactcttgttccgttcccagggcgatattttctttatcgccataccagatgcgttccgtaccaacctttttcccacggtgcaaaatttgcaccgtagtaaagttttgttgaccccaacgcagtaattttcttgcctcttcctcacgaccttttgcgctgtcagcccccattaccactgcaatgagacgacgctgcccatctacagccgaagcaatgagattaaacccggcaccagaagtatgacccgttttcaggccgtcaacattcatggttttatcccacaataacccgttacggttttgctgggtgataccgttccaggtgaggcttttctcactgtacatatgataaaactcgggctcgccgtggatgatagcgcgagaaagcacagctaaatcataagccgagctatgctggccaggtgcatccagaccatgcactgtttcaaaatgcgtatccttgagatgcagcttctcggcatagttgttcatcatttcaacaaactgccgttgcccaccggcaatatagtcagccagtgcaacacaagcgtcatttccggaatccacaattaaaccacggcttaaatcacgtaccgatacgcgatcgccctctttcaaaaacatcagtgaagaaccgacaaacaccggattatctttcgcccacgcatcacgccccacggtgacaatatcgtctggcgtaatgcgatgactatcgatagcgcgatccacgacatagcccgtcatcagctttgtcaggctggcgggattgcgctgttgatgctcattacccgcggtgagaatctgaccggtggtgtaatccatcaatacccaggacccggcatgaatctctggaggttgaggtgaaaaaggaatgttttccgccgcaaaaccagacgataaattaaaaacgaacaaagaagcagcaataataagacggcgtttcaacagcaaaccctcaggagtttcaaatagctgttctttttacggaaatacttatgaactggctggaataaagtgcaagaaaatgtgactaccctctcatttttatctgacatgatctgttgccactcgctgccaaattgtcgcgctaaagctgattagcacggtgatatttgatactctggcagacagcagaaacaacggatttaacctaatgatgaatgacggtaagcaacaatctacctttttgtttcacgattacgaaacctttggcacgcaccccgcgttagatcgccctgcacagttcgcagccattcgcaccgatagcgaattcaatgtcatcggcgaacccgaagtcttttactgcaagcccgcggatgactatttaccccagcctggagcagtattaattaccggtattaccccgcaggaagctcgggcgaaaggagaaaacgaagccgcatttgccgcccgtattcactcgctttttaccgtaccgaagacctgtattctgggctacaacaatgtgcgtttcgacgacgaagtcacacgcaacgttttttatcgtaatttctacgatccttacgcctggagctggcagcatgataactcgcgctgggatttactggatgttatgcgtgcctgttatgccctgcgcccggaaggaataaactggcctgaaaatgatgacggtctaccgagctttcgccttgagcatttaaccaaagcgaatggtattgaacatagcaacgcccacgatgcgatggctgatgtgtacgccactattgcgatggcgaaactggtaaaaacgcgtcagccacgcctgtttgattatctctttacccatcgtaataaacacaaactgatggcgttgattgatgttccgcagatgaaacccctggttcacgtttccggaatgtttggggcatggcgcggcaataccagctgggtggcaccgctggcgtggcatcctgaaaatcgcaatgccgtaattatggtggatttggcaggagacatttcgccattactggagctggatagcgacacattgcgcgagcgtttatataccgcaaaagccgatcttggcgataacgccgccgttccggttaagctggtgcatatcaataaatgtccggtactggcccaggcgaatacgctacgcccggaagatgccgaccgactgggaattaatcgtcagcattgcctcgataacctaaaaattctgcgtgaaaatccgcaagtgcgtgaaaaagtggtggcgatattcgcggaagccgaaccgtttacgccttcagagaacgtggatgcacagctttataatggctttttcagtgacgccgatcgtgcagcaatgaaaattgtgctggaaaccgagccgcgtaatttaccggcactggatatcacttttgttgataaacgaattgaaaaactgttgttcaattatcgagcgcgcaacttcccggggacgctggattatgccgagcagcaacgctggctggagcaccgccgccaggtcttcacgccagagtttttgcagggctacgctgatgaattgcagatgctggcacaacagtatgccgatgacaaagagaaagtggcgctgttaaaagcgctttggcagtacgcggaagagatcgtctgaaacaaaaaagccggagcgacaaactccggctttttgagatttaccggatgattatgtcatccggtttgtaagattacgctacgtcttcgtactgcggaaccgggttacggaaactcttggttacgcaagccaggtaaatcagaccgatagcagcccagatcagacccagaaccattgagctttcttccaggttaacccacagcgcaccaacggtcagcgcaccacacatcggcaggaacagatactggaagtgatctttcagcgttttgttacgcttctcacggatccagaactgcgagatgaccgacaggttaacgaaggtgaacgccaccaacgcaccaaagttaatcagcgccgtagccattaccaggtcgaagttgattgccagcagggcaatcgcgccaaccaggatgatattcatcgccggagtacgccatttcgggtgtacataaccgaagaagcttttcgggaacacgccgtcacgacccattacgtacatcagacgcgcaacgcctgcgtgcgccgccataccggacgccagtacggtaatggtggagaagatcagcgcgccaacctggaacgctttacccgcaacgtacagcatgatttcaggctgtgacgcatccggatctttaaaacgagagatatccgggaagtacagctgcaggaagtaagttgcaaagatgaagatcatgccgccgatcagcgcggtcaggaaaatcgcacgcgggatcacgcgctctgcatctttggtttcttccgacaggttgctgatgccgtcaaaaccggtaaaggagaagcacaggattgtcgccccggtaatcatcgggataacatgcgcatcgccagaccagaacggacgagtgctcgccagcgtaccagcgccttcaccttcaaatacgccataaacaaccatgcccagaatcaccgcgatcagcactatctgcaacacgacgattacagtgttgaagttcgctacggatttcagactacgcaggttaaaggcggtcataaaggccaccagagccaccacaaacatccacgatggaatggaaggcaccagagcttcaaaatagattttcgccagcagaatgttgatcatcggcgcgaacagatagtcgagcagagaagaccaacccaccataaagccgacagtcgggctaatggatttctgggcgtaagtgtatgcagagccagcagaaggatagcggcgaaccagcttcccgtagctcagagccgtaaacaggatcgcaatcaatgcgaacgcataggctgtcggcacatgaccatccgtgaggcctgaaacgataccaaatgtatcaaacagcgtcatcggctgcatataggctagacccatcattacaaccggaactaacgtaagcgttttacgcaattccacgcgagaggtgtttggagtaacgttatgcgacatggtcattctcctttacggtgataaccgtcgcgtaagcaaaaaattgccccatttttttggattcctcagcgacaacaactgtcgatttttagtaaatatctatccggtacgaagcccggcctcttggtatgaatgattggtttgaagcaaaaaataaccgacgctaattaaacgtcggtttttagtcattttttgacagcggcgcattgtgcctaaatgggggggaaatgacaagagaatgagaggcttgccataataatttttctttaaatggctgattttccgtcatcagattttgcataaacaccggcgatcgcactatttgctaaaatttcatctcgccaccagccgctggcaagccctgcggtctgttcattccagccaatccagacgggttcaaagagagtttgggcgaccactttcttctcgattaacgcgccactatcgagaaaacgttgcgccagataccgtggtaaatagccgcagccaaggccgctaatttgcagctccagcttggttttaaaatcgaaaacggtaatggcttcttgttcgtcgagaagttgtgaggccgtagaagcgcctgcctgcgcagtgtcccccaccacaatcgcccgatatcgtttaatgatacgacggtttaacggttcttcttcctgggctaacggatgatgaggcgcgaccgcaaagacttgttcaagatcgcccaaccgcgagaaaccaaactcactggaagatggtggctcatgcatcgcgccaacgataatatccgctcgcccctgagtcagggcatcccaggaaccaccgagtacgccattgataaacttcaggcgcgtcacgctatgatgttgataaaaagcttcaatgagaggcgcaagcagagaaaaaggaaacgtgtcgtccacgccaatcaccagctcgttttcccagccttcatgcagtttgatcgcctgcttttccagttctcgcacggtatgcagaacttcccgccctttctctaataacatttttccggtacgggtgaatttagcgcggtgtccgctacgatcaagcaattgaatattaaggtcgctttccagcttgtgaacggtgtaactcagagcggacggcgtcttgtagagtttggctgacgccgccgcaaaactgccttctttttctaaggcatcgaggatcatcaacacatccagcagtggtttcatacacgcccccttgcagtgcatgcggcgtcctgctggcgtgatcgtttactccagcggcattaccagcggatcgggatactggtattcaaatcccagttcattacaaatccgactgccatcaataatcttacctttgccgctgtccagactatttctgaactgcggaggttccagccccagtaaacgggccatctgcggatagaaaacattacgcgcagggtgagctagcgcacatatattatagatgtgtccgcctttaggtgcctgtaacaacagagtgatagcgccaataacatcttctaaatggactaaattaacaccatgttcaccatcaggggcggtttttccggcaaagaagcgtccgggatgacgtcccggtccgaccaggcccgcaagacgcagaatatcgaccgaagtaccgggtaaattgtgcagccagtcttcgagttcttctaatactcgtccactgttggtcaccggattacgcggggtggtttctttcaccgtgccttgcgcgtcgccatagacagatgtcgagctggtaaaaataatgcggggaatacgatgggccagcgcgctatccactaactcttgtaccgcttgtaaatagaactcatcgccggggccgctacgacgtgccggaagcgtaatgaccagcgcatcggcatccatcagggcatccagatcgtcagaatcgcaaactaactcaggctccatgcgaagcagatagctatcaatgccactcattcgggccgcttcgacaccatcttgtgtggttttactcccggtgacttgccagcctcgcgctgaaagtgacatcgccagcggcatgcctaaccaccctaacccgacaattgcgacctttttcatccgttatctcctgatacaccttagatctataaggctacgctagcgtatcaaaactgacaattcattctatgaatgaatctgttcaataatgataacgacatgctgcaatgagcagtgaatcgtcggtaaccgcgtataccagacggtgctcctctgtaatgcgtcgggaccagaagcctgacaaattatgtttcaggggttctggcttccccttaccttcaaatggtgttctgcgtgtatctttgataatttcattgatctttttaacaattcgcttatctgtttcctgccagtacagataatcatcccatgattcctcagaccagattagtttcactcaataatgtccttttccgttcctttgcctgatttcaggctatcgattgagtccatcaatctccgggcgttagcgggggaacgcagtagataagccgtctcttccagcgagttgtattcttcgagtgacatcagaacacaagcctctccattctgacgagtaatgaggatcggggcatgatcttcaacggctttcatcattgttgccgacaaattctgacgcgcttcgctgtagctaattgtacgcatgtaaatctcctcttttgtacagttcattgtacaatgatgggtgttaattaactatttattaattagtttgtagatcaagacattgtcagcgagacgaaaaatcagactttgctctttttggtgctgtcaagttagaggacagtcctcttagccccctcctttccccgctcattcattaaacaaatccatcgccataaaatatataaaaaaccccttgctttctaacgtgaaagtggtttaggttaaaagacatcagttgaataaacattcacagagacttttatgacacgcgttcaatttaaacaccaccatcatcaccatcatcctgactagtctttcaggcgatgtgtgctggaagacattcagatcttccagtggtgcatgaacgcatgagaaagcccccggaagatcaccttccgggggcttttttattgcgcggttgttaacggttcagacaggtttaaagaggaataagaaaatgacagacaacactcgtttacgcatagctatgcagaaatccggccgtttaagtgatgactcacgcgaattactggcgcgctgcggcattaaaattaatcttcacacccagcgcctgatcgcgatggcagaaaacatgccgattgatattctgcgcgtgcgtgacgacgacattcccggtctggtaatggacggcgtggtagatcttgggattatcggcgaaaacgtgctggaagaagagctgcttaaccgccgagcccagggtgaagatccgcgctactttaccctgcgtcgtctggatttcggcggctgccgactttcactggcaacgccggttgatgaagcctgggacggtccgctctccttaaacggtaaacgtatcgccacctcttatcctcacctgctcaagcgttatctcgatcagaaaggtatctcttttaaatcctgcttactgaacggttctgtcgaagttgcgccgcgtgccggactggcggatgcgatttgcgatctggtttccaccggtgccacgctggaagctaacggcctgcgcgaagtcgaagttatctaccgctcgaaagcctgcctgatccagcgcgatggcgaaatggaagaatccaaacagcaactgatcgacaaactgctgacccgtattcagggtgtgatccaggcgcgcgaatcaaaatacatcatgatgcacgcaccgaccgaacgcctggatgaagtcatcgccctgctgccaggtgccgaacgcccaaccattctgccgctggcgggtgaccaacagcgcgtagcgatgcacatggtgagtagcgaaaccctgttctgggaaacgatggaaaaactgaaagcgttgggtgccagttcaatcctggtcctgccgattgagaagatgatggagtgatcgccatgagctttaacacaatcattgactggaatagctgtactgcggagcaacaacgccagctgttaatgcgcccggcgatctccgcttctgaaagcattacccgcaccgttaacgatattctcgataacgtgaaaacgcgtggcgatgaggccctgcgtgaatacagcgcgaagtttgataaaaccacggttaccgcgctgaaggtgtctgctgatgagatcgccgccgccagcgaacgcctgagcgacgagctaaaacaggcgatggcggtggcagtaaagaatattgaaaccttccacactgcgcaaaaactgccgccggtagatgtagaaacgcagccaggcgtacgttgccagcaagtcacgcgtccggtagcttcagttgggttgtatattcctggcggctccgccccgctcttctcaacggtattaatgctggcgactccggcgcgtattgcgggctgtaaaaaagtggtgctgtgctcaccgccgccgatagccgatgagatactttacgcggcgcagctgtgcggtgtgcaggacgtgtttaacgtcggcggtgcacaggccattgccgcgctggcgtttggtacggaatctgtgccgaaagtggacaaaatcttcgggccgggtaacgcctttgtcaccgaagcaaaacgccaggtaagccagcgtctggacggtgcggcgatcgatatgcccgcaggcccgtcggaagtgctggtgattgctgacagcggcgctacgccggatttcgtggcttctgatttgctttctcaggctgaacacggccctgactcacaggtaattttactgacccccgacgccgatatggcgcgtcgcgttgccgaggccgtcgaacgccaactggcagaactgccgcgtgccgaaaccgcccgccaggcactgaacgccagccgcctgatcgtgactaaagatttagcgcagtgcgtggagatctccaaccagtacggcccggagcacctgatcattcagacccgcaacgcccgcgaactggtcgatggcatcaccagcgccggttcggtatttcttggtgactggtcaccggaatcggcaggcgactacgcctccggcaccaaccacgttctaccgacttacggctacaccgccacctgttccagcctcgggctggcagatttccagaagcgcatgaccgtacaggaactgtcgaaagaaggcttttccacgctggcttcgaccattgaaacactggccgccgccgagcgcctgaccgcccacaaaaatgccgttactttgcgtgttaacgcccttaaggagcaagcatgagcaccgtgactattaccgatttagcgcgtgaaaacgtccgcaacctgacgccgtatcagtcagcgcgtcgtctgggcggtaacggcgatgtctggctgaacgccaacgaatatcccactgccgtggagtttcagctcactcagcaaacgctcaaccgctatccggaatgccaaccgaaagtggtgattgaaaattacgcgcaatatgcaggcgtaaaaccggaacaggtgctggtcagccgtggcgcggacgaaggcattgaactgctgattcgcgctttttgcgaaccgggtaaagacgccatcctctactgcccgccaacgtacggcatgtacagcgtcagcgctgaaaccattggcgtcgagtgccgcacagtgccgacgctggacaactggcaactggacttacagggcatttccgacaagctggatggcgtaaaagtggtctatgtttgcagccccaacaaccccaccgggcaactgatcaacccgcaggattttcgcaccctgctggagttaacccgcggtaaggcgattgtggttgccgatgaagcctatatcgagttttgcccgcaggcatcgctggctggctggctggcggaatatccgcacctggctattttgcgcacactgtcgaaagcttttgctctggcggggcttcgttgcggatttacgctggcaaacgaagaagtcatcaacctgctgatgaaagtgatcgccccctacccgctctcgacgccggttgccgacattgccgcacaggcgttaagcccgcagggaatcgtcgccatgcgcgaacgggtggcgcaaattattacagaacgcgaatacctgattgccgcactgaaagagatcccctgcgtggagcaggttttcgactctgaaaccaactacattctggcgcgctttaaagcctccagtgcggtgtttaaatctttgtgggatcagggcattatcttacgtgatcagaataaacaaccctctttaagcggctgcctgcgaattaccgtcggaacccgtgaagaaagccagtgcgtcattgacgccttacgtgcggagcaagtttgatgagtcagaagtatctttttatcgatcgcgatggaaccctgattagcgaaccgccgagtgattttcaggtggaccgttttgacaaactcgcctttgaacctggcgtgatcccggagctgctgaggctgcaaaaagcgggctacaagctggtgatgatcactaatcaggatggtcttggaacacaaagtttcccgcaggcggatttcgatggcccgcacaacctgatgatgcagatcttcacctcgcaaggcgtacagtttgatgaagtgctgatttgcccacacctgcccgccgatgagtgcgactgccgtaagccgaaagtaaaactggtggagcgttatctcgctgagcaagcgatggatcgcgccaacagttatgtgattggcgatcgcgcgaccgacattcaactggcggaaaacatgggcattaatggtttacgctacgaccgtgaaatcctgaactggccgatgattggtgagcaactcactaaacgagaccgttacgcccatgtagtgcgcaacaccaaagagacgcaaattgacgtccaggtgtggctggatcgcgagggtggcagcaagattaacaccggcgttggcttctttgatcacatgctggatcagatcgctacccacggcggtttccgtatggaaatcaacgtcaaaggcgacctctatatcgacgatcaccacaccgtcgaagataccggcctggcgctgggggaagcgttaaaaattgccctcggcgataaacgcggtatttgccgctttggttttgtgctgccgatggacgaatgccttgcccgctgcgcgctggatatctctggtcgcccgcacctggaatataaagctgaatttacctaccagcgcgtgggcgatctcagcaccgagatgatcgagcacttcttccgttcgctttcatacaccatgggcgtgacgctacacctgaaaaccaaaggtaaaaacgatcaccaccgtgtagagagcctgttcaaagcctttggtcgtaccctgcgccaggccatccgcgtcgaaggcgacaccctgccctcgtcgaaaggagtgctgtaatgaacgtggtgatccttgatactggctgcgccaacctgaactctgtgaagtctgccattgcgcgccacggttatgaacccaaagtcagccgtgacccggacgtcgtgttgctggccgataaactgtttttacccggcgttggcaccgcacaagcagcgatggaccaggtgcgtgagcgcgagctatttgatctcatcaaagcctgtacccaaccggtgctgggcatctgcttagggatgcaactgctcgggcgacgtagcgaagagagcaatggcgtcgacttgctgggcatcatcgacgaagacgtgccgaaaatgaccgactttggtctgccactgccacatatgggctggaatcgcgtttacccgcaggcaggcaaccgcctgtttcaggggattgaagacggcgcgtacttttactttgttcacagctacgcaatgccggtcaatccgtggaccatcgcccagtgtaattacggcgaaccgttcaccgcggcggtacaaaaagataacttctacggcgtgcagttccacccggagcgttctggtgccgctggagctaagttgctgaaaaacttcctggagatgtgatgattattccggcattagatttaatcgacggcaccgtggtgcgtctccatcagggcgattacggcaaacaacgcgattacggtaacaacccgctgccgcgcttacaggattacgctgcgcaaggtgccgaagtgttgcacctggtggatctgaccggggcaaaagatccggctaagcgtcaaatcccgctgattaaaaccctggtcgcgggcgttaacgtcccggtgcaggttggcggcggtgtgcgtagtgaaaaagacgtagcggcgttactggaagcgggcgttgcgcgtgtggtggtcggctccaccgcggtgaaatcaccagaaatggtgaaaggttggtttgaacgtttcggtgcggatgccttagtgctggcgctggatgtccgtattgacgagcaaggcaacaagcaggtggcggtcagcggctggcaagagaactcgggcgtttcactggaacaactggtggaaacctatctgcccgtcggcctgaaacatgtgctatgtaccgatatctcgcgcgacggcacgctggcgggatctaacgtctctttatatgaagaagtgtgcgccagatatccacaggtggcatttcagtcctccggcggtattggcgacattaacgatgtggcggccctgcgtggtactggtgtacgcggcgtaatagttggtcgtgcattactggaaggtaaattcaccgtgaaggaggccatcgcatgctggcaaaacgcataatcccttgtctcgacgttcgtgatggtcaggtggtgaaaggcgtacagtttcgcaaccatgaaatcattggcgatatcgtgccactggcaaaacgctacgccgaagaaggtgcagatgaactggtgttctacgatatcaccgcttccagcgatggccgtgtggtagataaaagctgggtatctcgcgtggcggaagtgatcgacattccgttttgtgtggcgggtgggattaagtctctggaagatgccgcgaaaattctttcctttggcgcggataaaatctccattaactcccctgcgctggcggacccgacgttaattactcgcctggcggatcgctttggcgtgcagtgtattgtggtcggcattgatacctggtacgacgccgaaaccggtaaatatcatgtgaatcaatataccggcgatgaaagccgcacccgcgtcactcagtgggaaacactcgactgggtgcaggaagtgcaaaaacgcggcgccggagaaatcgtcctcaacatgatgaatcaggacggcgtgcgtaacggttacgacctcaagcagctgaaaaaagtgcgtgaagtttgccacgtcccgctgattgcctccggtggcgcgggcaccatggaacacttcctggaagccttccgcgatgccgacgttgacggtgcgctggcagcttccgtattccacaaacaaataatcaatattggcgaattaaaagcgtacctggcaacacagggcgtggagatcaggatatgttaacagaacaacaacgtcgcgaactggactgggaaaaaaccgacggtctgatgccggtgattgtgcaacacgcggtatccggcgaagtgttaatgctgggctacatgaacccggaagccttagacagaaccatcgaaagcggtaaagttaccttcttctcgcgcactaaacagcgactgtggaccaaaggcgaaacctcgggcaatttcctcaatgtggtgagcattgcgccggactgcgacaacgacacgttactggtgctggcgaatcccatcgggccaacctgccacaaaggcaccagcagctgcttcggcgacaccgctcaccagtggctgttcctgtatcaactggaacaactgctcgccgaacgtaaatctgccgacccggaaacctcctacaccgccaaactgtatgccagcggctccaaacgcattgcgcagaaagtgggcgaagaaggcgtggaaaccgcactggcagcaacggtacatgaccgctttgagctgaccaacgaggcatctgacttgatgtatcacctgctggtgttgttgcaggatcaggatctggatttaacaacggtaattgagaacctgcgtaaacggcatcagtgagtggcgtgctgagcaggtgtgatgttgttgtcacacccggagccattgcccgatgcgcaagcttatcgtgcctacacattatctcaacacacgtaggccggataagatgcgccagcatcgcatccggcaaaaaaaacgggcatggtgtcaccaccctgcccgtttctcttaaatgcacaataatattatttcgcgttgtaattacgcagcgcgttacgcccaagcacaatccccgcgccaaccatgccgcccagcagcacagccagaatcaaggtaattgctttcttcgggctatcgcgacgaataggtaacgtcggtttcattacatagcggtaagcatgaatatcaagtttatcaacgtcaagattgtcaatatccagcaggttttgacgagtctgatagtagtttgatgagaacaccaacggacgggtcgcttcgtgcttaatcatcgactccagcgcttcgctccccaaaagaaacatagtatcctgggttacgtcctgtgtctgttgaatctgcggctttgtcacctgcgcctgattcgcatactgcaacgcttcctgaatctgacgaatacgcagatctttctgctcctgcgcgaccacttcctgggttcttaaagagtcctgcaagtttttccgtcccagaacaatgttgtccttgagatccttttctagctcttgattcactttatcatcaacttgctgaatgtattgggccaacttcatttgtgcgccctctgcagtttgcccaacataagaaacagtcaatggtaattgctggttcttaacagaagattcgatggtaagtttttctggctcttcctgattatccagcgtttctgctaatgcagagaaggcagaactgaagcgaccaattaacgtctcctgcaaatccgatactttcggtgcagcctgaccatagataacattcatggcattgttatagccagcaatttgccccacgtcgggctgagtgataattgctgttgacgtccatttctccttcgctactgccaaataaccaatagccagggcaatagccacaatgacggaaatgataattgtcatcttgccacgccacaactgcactagtaaatcaatcaaatcaatctgttccgggtcatggttttgcccagaaacattattattttctactctcatcattaccctaactgacggaaatttccaagtccgcatagtttagcgataatccccgtgaatgctataggataagtgataaaaataatgaattattgcggaggtaacaaaagacaatcagggcgtaaatagccctaacaagatgttagtcgctgccaaagagatcgcgggtgtagaccttatctgccacatccttaagctcttctgccatacggttggagataatgatgtcggcttgttgtttgaaggtggcgagatcacgttccaggcgagagttgaagaatgagtcttctttcatcaccggctcgtagatgatcacttcaacgcctttcgccttgatacgcttcataatcccctgaatagaagacgcacggaagttatctgacccgctcttcataatcagacgataaatacccaccacttgcggtttgcgtgacaaaatggcatcggcaataaaatctttacgcgtgcggtttgcatcgacaattgccgagatcaggttattcggcacagactggtagttcgccagtaactgcttggtatctttcggcagacaataaccaccataaccaaacgacggattgttgtaatggttgccaatacgcggatcgagacaaacgccttcgataatctggcgagtattcagacctaaactttctgcatagctatccagttcattaaagtatgctacgcgcatcgccagataggtattagcgaaaagtttaatcgcttctgcttcagtggagtcggtaaacagggtcgggatattttgcttaatcgcgccttcctgtaacaacgcagcaaaacgttctgcgcgttctgaacgctcaccgatgacaatacgtgacggatggagattatcgtaaagggctttaccttcgcggaggaattccggagagaaaataatattttcagtacgatatttcttatgcatcgctgcggtaaaaccaacgggaaccgttgatttgatgaccataaccgcataaggatttatctcaactacgtctttaattactgattctacactggatgtattgaaataattagttttaggatcatagtcggttggagtggcgatgatgacataatcagcatcccggtaggcttcatttttatctaatgtggcattaaagtgtattttatctgattgcaaaaactgctgaatttccttatcaacaataggagatatccgatcattcagcatagcaacgcgtgacggtaaaatatctaatgccacaacctcatgattttgtgcgattagaagcccgtttgacaagcctacatagccagtaccggaaatggtgattttcatttcatgctctcagaattaacttaactgtgaatcatgatgtttttagcatcctgataagagctaaaagttttaacgctacgttgttcgatggtcaacgcaacgaaaaaaaattcagattttctttataaggatagctgatatttattaagttaatattaagcagtgaaatttagtctataagataattggcaaaaaaaagcccggtgcaatatacgccgggcctcaatttttaatgttggttaaatcagattaatccagccattcagtatggaacacaccttctttatcaatgcgcttataagtatgtgcaccgaaatagtcacgctgtgcctggatcaggttcgcaggcagaacagcggcacggtagctatcgtaataggcaaccgcagcggcgaaggtcggaaccgggataccgttctgtactgcataagcaacgacatcacgcagagcctgctggtagtcatcggcaatttgcttgaagtacggagccagcagcaggttagcgatctgcggattttcggcataagcatcggtgattttctgcaggaactgcgcacggatgatgcagccagcacggaaaatcttcgcgatttcaccgtagttcagatcccagttgtactcttcagacgcagcacgcagctgagagaagccctgagcgtaagaaacgattttgccaagatacagcgcacggcgaactttttcgatgaactcagccttgtcgcctgctggctgtgcttgcgggccagagagaactttagatgcggcaacacgctgatctttcagagaagagatataacgtgcaaacacagactcggtaatcagcgacagcggttcgccgagatccagcgcactctggctggtccatttgcccgtgcctttgtttgctgcttcatccaggatcacatcaaccaggtagttaccatcttcatcttttttggtgaagatatctttggtgatgtcgatcaggtagctgctcagttcaccgttattccactcggtaaaggtctgcgccagttcttcgttggtgaggttcaggccacctttaagcagagaataggcttcagcaatcagttgcatatctccgtattcaataccgttgtgaaccatcttcacatagtgacctgcgccatcggcaccaatataggtaacgcatggctcaccgtcttcagccactgcggcgattttggtcaggatcggcgcaacaagttcataggcttctttctgcccaccaggcataatggaaggacctttcagcgcgccttcttcaccaccggagacaccggtaccaatgaagttaaagccttcggcagaaagctcacggttacgacgaatggtgtcctggaagaaggtattaccaccatcaatgatgatgtcacctttatcgaggtatggcttgagggaatcaatagcagcatccgtgcctgcacctgctttcaccattaacaggatgcgacgaggcgtttccagagattcaacaaactctttcaccgtatagtaaggaaccagttttttgcctggattttcggcaatcacttcttccgtcttttcacgggaacggttgaaaatagagacggtataaccacgactttcgatgttgagcgcaaggttgcgccccatcactgccataccgactacgccgatctgttgctttgacattgtttactcctgtcaggggtggtcaccgcgaagtgtgcggcttaaatgtggtatagatgttaactcactcatagagatactgaatagcattaccttggatataccacaccggatatctcatcttttccgttttttaaaacccatttatatgaaattactgaattacttgttcagtaactcaaggataagttttgtcttttcttccatcagcggtacatcgccgcgcgattccacattcaaccgcaccaccggttcggtgttggaggagcgcaggttaaagcgccagtcggcaaaggtcatgctgatgccatcggtacgatccaccgccagcgcctcacggctaaaatgctgttccacgcggttaatcgcctcaacgggttgcgccagtttgctgttgatctcaccgcttgccggaaacgctgccatccggtcgcgcaccagttcgcccagcgtttttcctttcaggcacaccagttcggcgaccagcagccacgggatcatgccgctgtcgcagtaagcgaaatcacggaagtaatggtgggcgctcatttcgccaccgtagatagcgtcttccttgcgcatacgttctttaataaaggcgtgtccggttttcgacattaccggggtgccgcctgcggcagtcaccacatcaacggtgttccaggagagacgtggatcgtggatgatcttcgcgccgggatttttttcgaggaacgcttctgccagcaggccgacaatgtagtagccctcaataaactgccctttttcgtcaaacaggaaacagcggtcaaaatcgccatcaaaggcaatgcccatatccgcgccgtgtttgatgaccgcattgcgggtgtcgtcgcgacattccggcagtagcgggttaggaataccgttggggaaattgccgtccggcgtgttgtgcactttgattaattccacgggtgcgccgagggctttaaagcgggcttcaatggcgtccaccaccggacccgccgcgccgttcccggagttaatcaccagcttgagcggcgtgaggtttttgacgttgatataaccgaacaggtgatcaacgtaagcgtcacgcagattgatttgctgatagcgaccgcgtttggtttcatcaacgggaggaaagtcgttggcttctgccagacgctggatgtcgcgcagtccggtatcaccgctgatcgggcgagccccttcgcgcaccagtttcatgccgttgtaatccatcgggttatggctggcggtaacttcgatgccgccatccacgccgagatggaacgtggcgaaatagatttcttcggtgccggacatgccaatatccagcacatcgacgcccgcatcctgtaaccccttcgccagcgccagttttaaggtttcgctggtgagtcggacgtcaccgcctaacacaatggttttcggtttgagaaattcgccataagcgcgaccaatgcgccaggcaatatcttcattcagttcttcgcctaatttcccgcgaatatcataggctttaaagcagggtaaactcgacatgatataccttaaacaaataatacttattacagattaactaaaaatattagcgctcttctactaacgttacattatcaaaaatttagctacgaccatatcggtcctgaaaacggataacatcgtcttcttctaaataagatccagaacgaacttcaattaaatcaagaggaattttccctggattttccaagcagtgtattacaccaagaggtatgtaaacagattcattttcgctaagaatcttagtttcagaacctatagtcacccttgcagttccagaaactatgatccaatgttctgccctatgatggtgcatttgtaaagaaagtccttcaccaggatttactgttatacgtttgacctgataacgctcccctgtgtcaatggaatcatatttaccccaaggacgatatacttcgcgatgaacataatgctcgctacgacctgaatttttaatttgttcgactattttctttacatcctgaactttatttctctctgagacaagaacagcatcctttgtttggacaacaactaaattttccactccaactgtagcaacaattcccgattcggcatatatgaaagaattctttgtttcatgagagaaaatatccccaactattacgttgccgtctgagtctttatcattaatttcccaaagagaagaccatgaaccgacatcactccagccagcatccattggaataacaattgcgtcttttgttttttccattacagcgtaatcaattgactcttcaggacacttagagaaagaactttcatctaaacgcacaaaatcaaggtcaaagttcgctgaagcaattgctttttcacaagcggataaaatatcaggccgaaattgtttaagttcctctatataacgatttgcactaaacaaaaacataccgctattccaataatactcaccggaagcaagatatttagtggctgtctcatgatttggcttttcaacaaatgatgacactataaatgcatccgaatcttcctgattaatatattgtcctcgatgtatataaccataaccagtttctgctttgtctggaattataccaaatgttaccaatttcccatcagcagcgtatggaattgccgatctaacagcgttacaaaatttttcttcatcgtgtataacgtgatctgcagccagtacgagcataagatcatctgcacttttatcagacttagacatcagcaacgccgctaatgcaattgcaggggcagtgttacgcccaacaggctcaaggatgatattctttgaagtcaatctatcgatttttctaagctgttcagcaactataaagcggtattgttcattacaaatgacataagggttggtacaatccaaaccatccagacgattagccgttgtttgaagcatggtatgactaccgattaggctaagaaattgtttcggatagagaattcttgatagtggccacaaccgactgcctgaaccaccagccataatgataggtgtaataattttattattgttcatataatttctcatctaatgtattcattaaattggcaacttttgattcccaagaaaaattattttctacaaaactacgggcattttcagccacttcagtataacgattataatcgtaaattatttctcttagtacgtttttatattgctctactgtatctgcaacaaaaatttcgctacctgattttgcattaataccttcataaccaatgctagatgtaatacatggtaaacctaaagccatgtattcaagaattttattttgtacgcctgctccaagacgaacaagacatatacctatatgccctgtagaagcggaagaattgatatcatcaacagtacctaaagcaattgtatttttaaatgaatttaatatatttttattagtttctgagatcttaccaatcactttaaaaataatattaaactcatcatacaagcaaggtaaaatattcttagcaaaatgttttgcagcatccatattttgtaaagaatacatatttccgataaatataagttccacaggcttatcgatttttatttctctttttatatatctcaaggctgatgtatcaaccccattattgactatatggatattactgcccggattagggtagagatagtcacggtctacggatgaaataaaagtggtcaaatcaaaaagattcgccacagaacgttcatatgattctaatcttttttgttccagagaataaataattgcacgcaaactttttttacttgctaattttttaacgcgactgtaattcaaagatattgcatctgtcatatcaagaattttgaacttgtctgtatccttaacataatcagcaactcttatcagatgacaaaatactgcatcgcattgtttaattaatttattgtatttattcttaaatgtgtccgattgataataagcaatttgcaacggtttttgcgtaaccaaagcttttaatacattataatatgatttatattttggtagatagacacgatgaatttctttgaagaccgagtcatttatatttatttcaagttctagtggttgatcacataagctcagaagaataagatcatattttttggaaagttctttacataacatatagactcttaatctatcccctccaatgacagggtagggaaagcgaggtgtaagaaccagtatttttttctctgctctgattgattcataaaactgaaaccttttatattcagaatccgtctggataattttttttccaacgccacgagtccaataacatctgttctagagtttgttcggcttgccagtccaataaagaattagctttatctgcatcagcccaacaagacgcaacatcccctgcccttctctctataaaagatttattgaccttaatgtttgttaatttttcaaatgtagtgattaattcaagcaccgaataaccttttcctgtaccaagattaaagatattatatcccgaattgatacttaaataattcattgcagccaaatgacctttcgctaagtcaacaacatgaataaaatcccttacacctgttccatcattagtagggtaatcattgccataaataaataatttatcacgtttaccactcgcaacatccaataaataaggaacaagattattagggataccagatggagcctcacctattttaccactagaatgagcaccgacaggattaaaatatctcaagcaaattatatccagttttcccgtggaactaacatcctctagaattttttcaacaaaatacttcgatgtgccatatggattcgtagttcctccaattttagctgtttctggaattggaattatctctggttcaccatagactgtcgcagatgagctaaagataaattttttaattctgtactcttccattacctgtaataaagtaatggtcactccaacattattctggtaatactttaagggttcacttttagactctgaaacagatttaaagccagcaaaatgaataactatatctatggcgtgtttctcgaaaatagcggagagtgtcttcctacacccagcatctccagtaattgttataaaatcacgtcgagtaatttcttttattttttcgatacacttgtatgaagcattactgaaattgtccagaacgataatctcatgacctgcattcagtaattcaatagccgtatgagatccgatatatccagcaccaccagttactaatatgttcatattatatctccactaactaatcgtcaaaatttattatatcaagttcatggccattaaaccgataatgtgaataatatttttgctgataagacattattagctgtttattgatacttttcatcttgaaatctttaggaaattcctcatccaaatgtgagatttttttaacacactccttattgtttataatttcatcatagccgattaaggaatgctctgtcgcataaatatataatccatatgatagtgcttctgcaatttttgttttcattccacttcctaaaactataggagaataaaaaacatcacaagcagataataaatatgacatttcactattagatagattatcgaaaaaaaataaattatccaaatcaggaagattcaaagtagtacttttcctacctgccaaaatatagcaataatcattattagactttgctgcatttaaaacatagttggcagcatctatatttggaaaaaaatcaaaagatgcagtaaatactacttttttcctattatcattattcaatcgattatactcattaataaagtgagctgacaatacatcagttggtttttctctactaaatatcacagggagaattaaatttctgctttttttaatcccataaaatttatccattgcatttttatcttgccgggtaatatagctaactaaatctgaattcttaagcccgataaattcattgagataaacaattaatttttcaataaaagtagttatgtttttatctttttgtcttattaagtcatattcgaagttatccgtaaacaatatgatctttttgtggggcatgagtattctaaaaagcagacataacaatccaagccgagagttgtgaaaagcaagaatatcttgcttccgtaaaattttaattattgagaaaatataagggacataaaatgatggtataaaaaaaagcctggatattatatcctgacgtttacctttaataaatgatatatgttgaaaagtattgtcttcgaatagtttacctgaggattttttatcaataagtgttaaattaacattctgtttttgtagaaaactaacaagcgtacgtaaatatactcctcctccggtaagttcattatatgagttaattgaaatgagacagagtttcttattttttttcattaaatgccgccgttaaaatttccgcatatctctcttcagaaaaaagctcacgcttgctataaatagtttgtctcaaatgataatatttttcattatcaagactaattaatttgtaggctacttgtgctaaatcttctttattattggcaataaatacgccaggaaaactttctgcatacaactctctaattgcaccaacattatagcctatcacagggcaaccacagcatagcgcttcaatagtaaccagctcatatccttcataataggacggtaaaataagtactctggatttcttaaatatttctggcattttcgcataggggacagcaatgctggtcagaacattatttagcgaagcaaaattttgtggggcgggaatacttgaaactaaatggaaggaagtatctggcagatttttacatatgtaatacagatcatctattccttttcctttttccaatcgcccgacaaatgtcacatattctgcttcattaacatcagtgtaatcaaattgtgcaagatttataaaatttcgaacaactttgattttatgtgaattaatattgtaaagctcattccattcacttttaaccttatttgaaacagcccagatattttttgaaaatgctccagcccaacgctcatagaaagataaaagaccactgccagacaaccgattaggttttttattcatgactgtttgaaaataacatttcatattgccatgagctattaagatgtcattcctataaaaaggagaacaatagccatgtgcaataactttaaacgtcacgccacgtaatttttgtaaggttaaataaagagaaactaatattggataaagtgctacttgtatttttttgttacgaattttgttagaaattttgaagtatgttttatcaagtataatgactttaacccccaaatttttaagaatgttacattgttgggcaacaaccctttccaccccaccttgccctcctgaaccattatacgcggcgatatatataatcattttaaaaacttcccgataaacgacttcatttttagcagaacgaattgacactgtcggtaaaatatagcatgcttttgtcctgaaagaagattcaaattatcattatatttttttaaaaatctataattatttatgcaactttcgtaatgatattttaatcgattagctgttcttgcccctcccgtcgcttttcttggaggtaaatttattaacaaagcctttgaatcatatataaattttttatttttaataaatagagatagcatgaaatcagtttcctcacgatagcagtttcccgtataagatatatcaaatcgatatttcgatattagttccctttcagctagaacaaaaggctgtgcataaaaacattcaatcggatggtccaaatcacatgtataactaaaatccaatctatttagatcactaacaaaacgcccctcttttttatgtcgatttatgcaatcttcaattgttttctcgttattattcatataaagtattcttgcgccgattacatcagcgcctgtctcatattttgtagccaataaccgagatataacaccgggtaagaggtaagagtcatcatcaccaaaaaaaatatatttccctttggctatttcaatccctcggtttttagaatacatctgttttttattcgtttcattttctaaaataactaactgagaatatttttccttcagttcagctaatacactatttgtattatctgttgatccatcattgataactataacctctaaagtctcatcctgaaaataacttggtatgacctccttaagaatatgagccctgttataacttgggattattatgctgacatttttttctgacattttggtcaatcctttttatactggatgtataatgtaactaaaaaagcaacaaatatacttttgacaagataggggaagaaatagaacaaagtctctcttggtgtgaataatataggtggcaacacactataataaacaaaatatataattggtttgttttttgtatatttttccaatacatttaaattaagtaaaagtaaaaagggtataatgaaacatccaatcagaccaaatgctaaaaacgattctgctaaataactccccccaagtccgaacccaagattatatagttctgggtttgctgtgtatgaggccaaatggctatagcttatttccggcaagctcaatttaacattaaatatttacgagcaagttattattaactggctgaatagataggtaacattatatccccctgacaatagttgtagttttactgattgataaatggaaagatatgatactcccatgccgtatacaaagtttataacaggattattaccctgcattaattgaaaaaaactccctccagtgcgccacattgagataaattcactaatcacaaaaatgacgctaaaaacaaaaatcattgtaatcagcagacgtaagtttcttgtctttacttcattaaaatatatacatgtaaccgttaaaagaaacgttatagcttcactacgactacccttcaaggtgctaaatgcagcaatgcatatcgcaataaaaagaaattttttatttgttctgaactgtatatgaaacgcacatataaggaaaaaagaacaataaaataaataagatagaaaatcataacctattggcgttgttatatttgattgataaatatcaacataactattagattctataaagttaaaaaagaatatcccttttacaaccatacctatcgaacccagaaaaaataaagtcaaaagaaactttatttttagcaattgtttttcaggataaggaccatgcggataaaatttttcagtatttttgcatagaattagtcccaatgtataaccataatacattagtgttatagcatagttagccaaaatcacatcgtcatccatatatccttcaataaaccaatcggcaatcctataatcatagtttgcaaacaaagataataaagggcgacaacctaaaaacacaaaagatgatataacgagaaggctggccggagaagttattttattagtgatatatgcgatataaaaaactgttatcgttgctataacaaggatatattgtgatttatttggttcattaccaaacagtaacactaaaattgtcagcattaaacttaaatagaatgtaatagcaggaaccgccttcactttcattatactctcgctccccactttcgatgggcaataaaagctagcatactgaatacaagaaactcaccaattaggtttaataaaaccccccccagaatgtcaaagcgtgatattaacagccaggacaaactaacaacaataattcccgccataacatttatacttcgtagtatttttacattatctgtcggtataagaaactgtataccaaggacattatttaaagatgaaaaaatggtaattattgacgcaaataaaataataacaaatgaaacgtcaactttacctataaaagtcgccacatattgccctaatcccatataacataaacatgcaattatgctaattgttaaatgcacaaaaaaactttttttaattctataataaaacagtttatcttgaggtttaatttctgaaacttgagataacatatactgtgatattggattaattagactttgacatgctgttgtcattttttgaacgattgaaaaaacaccaagactcgtattaccgcaaaggtttccaattaacacaggaattagaccattgtaaccaatcgtacctattacgccaataaaaacatttcctgccttcttaaattccacaatgcattcattaggtttaagatgaacaacatggctaatatgaatatttggccataagtatatacagcatatgagtaatgttgcattttgcaaaaaacttaggataaaaacattatctccgccactacagacataaacaagaagtatgataaacaatgttattctcactattacttgtgagtatgaaagttttttaaaatcaccaatcccctgcaaaaaccaattgggcgataatatattaccaatagtgcatagaaaaattgacaaaaacccaaaaaatgacaagtggactatatttaatctgcacaataaaaatacacatgttaatgcaattataaaaagcaatgattttaaaagaacaactattgagtaatagcgctgtaaattttgggtctcacatctatgtctcgcagcaaccacaggtcctgtgtaagtaaagccaaaatcaataatcaaagccactatttgataaatagatgtaatatagaccaattccccatattcccccaacccaatatattttatcaggatagggataattaccaatggcgcgatataattaaataactgcaatatatacaaccctaaaaatacgttttttattttatctttaagccttaaataattgtgcacacgttgtatcctattcatttaggtgtaattatattattgaaatgcgatgttctataagaatgactttataatttcagcacgctaccgcccctggctttacagctaccagagcactgcatgcatgcctacgatgtagcgagcgttacccactcgcgctaaacccgaaaaattcaaacgctaattgtcttaccaatccgctctggaaacaaggaaaatcctggaaaactttgactaaaatcctattgctaactcgttgttattctgattgtttatataaaacaacggcaggaaaattcgcaacaaattactttcgccacgaatcttcactgccgttataattttcttatcaaccgttacattcggtcagattttcattattcgcttaacagcttctcaatccctttacggaacttcgccccttctttcaggttgcgtagtccatacttcacaaatgcctgcatataccccatttttttaccgcagtcgtagctgtcacctgtcatcagcatggcatcaacggactgttttttcgccagttcagcgatggcatcagtcagctgaatacgcccccatgcaccaggctgagtgcgttcaagttccggccaaatatctgcagaaagcacatagcgaccaacggccatgatgtctgagtccagcgtctgcggctgatccggtttttcgataaattcaacaatgcggctgactttaccttcgcgatccagcggttctttggtctgaatgacggagtattcagagaggtcacccggcatacgttttgccagcacctggctgcggcccgtttcgttgaagcgcgcaatcatggcagcaaggttgtaacgtagcgggtcggcgctggcatcgtcgatcacaacgtctggcagtaccacgacaaatgggttgtcaccaatggcaggtcgcgcacacaaaatggaatggcccaaacctaaaggttcgccctgacgcacgttcataattgtcacgcccggcgggcaaatggactgtacttccgccagcagttggcgcttcacgcgctgttcaaggagagattctaattcataagaggtgtcgaagtggttttcgaccgcgttcttggaagcgtgagttaccaggaggatttctttgatccctgcagccacaatctcgtcaacgatgtactgaatcattggcttgtcgacgatcggtagcatctctttgggaatcgccttagtggcaggcaacatatgcatcccaagacccgctacaggaataactgcttttaaattcgtcattatttcatccacctgtaaaatggttgctgaattatagcttgttcgatttttttcgccagcatcaattaccctgaattgattactgaattacttgtgatgttacgccgcttcgttgtggattgcagtagcattgttcctaagtatggctccatttttccaggaatggtcgcaaatctactccctccgttctggcaatctaaagttaatcttctccacattaacaatatggtgattaatcctgtcgatatcgacggagatttgtcctttttcattcaccgcatgaacatttgcaagagacagcagtgtttcttttttcgccataaacacgccgcgaacgtctttgcgcatgtcaaagttcatgctcaatgcgggtccaactgaggattcctgcatcacattgatatttcgcataaaaagatgttgcggtttgttgtgtaactccagcgacgcacgcttcatctcaatgttagtcagcgccacaaaggagacagcattcccggcggagatttggatgccgcgcaatttataagcaagatgagtattatccagttgaatatcattcactcggaaattctgcggtatcgagagatatttgcctttaattaccccatagccgattaacatcccggcactattaatcatttcaatattatcaatcacaaagttgtcacaaccataaatagcaactgtggcgttatcaatacctgctttcttactgaaatccggcgtgatattacgagctttgatattacggataacaaaatgtttaccattttcaacatggatcagttgccgacaatctgatcccgtgatattcgcaacgacaaagtttttcactgcctggttttccggataattattatcgtaagtacttcctgccagtcctatgccaataccccagttgattttgccgttagtacagttgatgcgctcgatgacatggtcggatatcaaaatgtcgcgatcgttgattgctacattccattcaatggcgtcgccctgtaagtcgctgaacttacaattggtgatgttggcaccgataatctggttatgaaatccctggcgtaaaatggcgtaattagcgtggctgacggtcaggttatcgatggtcaagttgcgcatgacgcgtttatttttgccgccgatataaatctgcgttaccgggccaaaaccgctcatcgccaaccctttgatgatgcagtcagaaccgcgcacatccagggtgatgttatgcatacggccgcccttctcccctgtcacctggctgccgtcttgtaagacaaaacgccctctgccgttgccgcgcaggcttccaaggatgtgcaacgttttgccaggaggaatgaagatgccggtgttgatattttcacaaacgaatccggcaggcacgacgaccgtttgcccttcgctgaaggcttgtttaaatgaggcgatccagtcgtgtgggttgtagtcgttaatgttaacgatttgtcgggcgggaagcgcgcgagcgaaaggggtatggaggaaggcaagcgccgagcttgccgtcaggaaggtgcgtcgggagagttttttaaatggcatacgttctcctctataaagcctgcagcaagctggcgagttctcgattgatcacctgctggttaaaatcgtgttcgactttttcgcgcgcacgtttgacaaccgtagtaagttcgtcggtgtccagttggctaaacgccgccagtcgttgcgccagtgcacaggcatcgttctcaggcaccagccaaccggatttatcggcctccaccagttccggtattccgctgtgcagagtagaaacaaccggaatgccaaccgccatcgcttccattagcgccaccggaataccttccatatcgccatccgcacctgtaaccgatggcaacaggaagacatccgcgtcatcgagcatcgctttcacttcatggctcggtttaaagcccggcatctctatcacatcttccagttgatattgttcgatgagggtgcgcaggcgtcgttcccacgggccaatgccgaggatgcgatagcgaaatgccacgccctgctctttcaactgacggcaggcttcaatcgccacatgcaggccttttttctcggttaagcgtgcgacggaaatgatttccagcggcgttgcaggtgctttcaccggacgcgggctaaagcgcgtcatgtccacgcccatgcgcgatacggcgattttttccctcgggcagcccattttttgcagccttccggcccacagatcgcttatcggtagcatcagatcgccacggcggaacagttgctgatattcgggagtgtagtggttgagcacttcccgcctggagatatcaataccgtggaagatagtggcaattttgccgcgaatgacacccagttcgcgtagttttgccgcggttaccccagcagggccaaaatgagcgataaacacatcggcatgaaacggtgttgcgacctgaccacaaatggcagacaaaatcaggttccgcgactcagcaccatagcgtttgaggttgagcgcctgccaggtatttttacgatgaatgccgcgtaaggtctggctggcgcggtggcgcagtttcgccactttgcccgcaggttcgtcctgtaaccagcgggttctggcagcaaggttgtatttcgtccatgccgcgtgggtgttttgtgtgtcgcctttttgcagcgcgacaatctccacctcaaatcccatatcaataaacgcggtaatttgattgaggacgaaggtttccgacgacagcggaaatttcagtaaaaagaagccgaccttcatttcacctccccgatgcgttcaagcacagattgcaccatctgcattcccgtctgacgttcgcgactgacagcttcgttaagtcgtgcgttcagcgccggaagctggcctaaggtatccgcaaccatcgcttgcaggctgccgtctaataaatgacggatatcaattgccatctctggtagccccagttgttgcataatcccagcggatttatgttcatagttgatggcaatcgccggggtggcaaagttcattgagataatggcggagtgcaggcgcgtaccgacggtgagttcacaggcccccagaattttgcccatttccagatcgttgagttcatccatcaccacgtggtaacgggcaggatcgctgatgtgctggcgcagattgagcgccaccatgcggtcgtctttgttatagctgtcgatgcccgtacaggtggagagcgcaatcacctgatagccttcgtcgagaatgcgattgaccaccccggcaaaggctttttcatacgcttgttgagtggtgccgaggcgtttgtcgaacggtgccagttcacgcagggtaatggccaccgctttctgttgtgcggcaacgtccagccagtgttgaacagcatagctggcggtgaagtcttctgtgtggtgatcgaccagccacgcggtatcgacgccatgttcaacttttgcggtagtgatattgctgcgtttcatcaaatcaaggctgaccgattcgcgcaggatcagcgcgtcgcagtgaccaaaaacgtagttcgccagttggttaaattgcttatcctggaacgggccgacgctgtgaccaatcataaacagcggctttttcgccatgaaagtgcaaagcgcatgttcaaactgcggcacgccgtagagatcgacaaaaaacgatccgccgacctgaataatggcgtcgtaacctgacagcagtcgcacgaagtcagtgaatccctgggcgatggcgatattacgcagcttgccagtgtcggtgacgcgtgagagcagtacctggtgctggtagcggtgacggaggacttttttaacgcgcccgacaacgcccgccgcgctgttgtgttttttcatttgcaggaacagcgggtcgcccattaccgggcggttgagcagccaggaagaactgaccggatagcggctcattacgtccacttcggcatgtggactgaggatattgatggcatcaagtaagccgcgcaagatggcgctgtcgccgcggttgccgcaagtgtggttgcccagaataagtaatttcattttttcctcataaatttgatgccaggtgaggctgtgtttgttgttttcgttgccgttttttgcctgatgcgacgctaacgcgtcttatcagacctacaagatccgagcacagaaccgtaggacggataaggcgttcacgccgcatccggcattcagtgcctgatgcgacgctgacgcgtcttatcaggcctacaagacccgagcacagagccgtaggacggataaggcgttttacgccgcatccggcattcagtgcctgatgcgacgctgacgcgtcttatcaggcctacaagatccgagcacagaaccgtaggacggataaggcgttcacgccgcatccggcattcagtgcctgatgcgacgctgacgcgtcttatcaggcctacaagacccgagcacagagccgtaggacggataaggcgttttacgccgcatccggcattcagtgcctgatgcgacgctgacgcgtcttatcaggcctacaagatccgagcacagaaccgtaggccggataaggcgttcacgccgcatccggcattcagtgcctgatgcgacgctggcgcgtcttatcaggcctacaagatccaagcccagccccccaggacggataaggcgttttacgccgcatccggcaaccgttgccggaaccgaaaacaaccattcaccccgcccgtaaaagcattttcattttttcgctgcgacaaaactgacgcttcacttccaccaccagcggatggcgcgacagcacaatcatcaccacaaacgccagcacgcccgcggctatttgcaccgccagcagcatccccagcgccagttgccctttcagcacaatgcccagcgcataactgaccaccagcgtcggcagcgagagataaaacggcagccacaaactcaggatgtactggcgataactggaaccgagcaccggtttaatcatcacgaaatagctcagaatggtgttgataatctgcaccagcaggaagccaagcgtgacgccgattgcgcccgccatctgcccaccaataacaatcgccggaataaacagaaaggttttgaatacgttgaatttaaagctgatatcgacccgcgctttcgccatcagcagcgaaccaatcgggttacccacggaacgcagcagccccaccacacacagcaattgcagcaccggaataatgctgttccacttctcaccaaagaccagcggtacaaagttattcgacaccaccatcagccccagcagcgccggaaagttgataatccccactaccgacagcagcttgtagaagttaacgcgcagcttttcggtgtcgtcctgaattttggcaaatgccggaaacaacacgcgggtgatgattgggttcagcttcatcggcggcacaacggccacgttgtacgccaggttgtatccccctgctacgcccgcgccgagaatacgcgccagcaccagcgttgaaaggttggtgttgagatagttgatgatgctgtccgccgtcagccaggcaccaaaacgtaagtttggtgccaccgacgccagcgagaaatgcagaccggggcgataaattttgcggccaaagtagccaaacagcagcgttctcaccgcactattgaccagataaccgagaatcgcggtcatcgccagcggccagaaatgggcgctaaccactgtaaaagtgaagcccgccagcaccgcgctggtttcgatcatgccgattttgttgaactccagctccttttgcatcaacgcgcggaactgttgcccgtgggggataaccacaaacgccagcgacaatgttttaatcaacggtgccaggtccgggttattcaacacgtcaccgatgagatcactcaacaaaaacaccgccacgcacaccacaagccccagcccaacgttcagccagtacagcgtggtgagttcaaggtggctgatttcttttcgctgaataatggagttagcgataccgaagtcagaaagcgtatctgccagcgcaatgatcaccagcgacacagtcagcaaaccgaactggtggttatctataatccgcgccagcacagtcatttgcaccagaccgaggccgatgatgatcaccgtggcaatcgccgaccacttcgcgccgctgatggttttttcacgtaagctcatatcaatatgccgctttgttaacgaaacctttgaataccgtcaggaaaacgattttgatatcgaaccagacgctccattcgcggatgtactcaaggtcgaactcgacgcgtttttccattttctccagcgtgtcggtttcgccgcgccagccgttaatctgcgcccagccggtaatgcccggtttcactttatggcgcagcatgtagccttcaatgagctggcgatactgttcgttatgcgccaccgcatgcggacgcggaccgacaatcgacatccccccggtcagcacattgataaactgcggcaattcatccagcgaggtgcggcgcagaaaattccccactttggtgacgcgcggatcgttctgcgtcgcctgggtcaccactttgtcgttctccatcactttcatggaacggaacttccacactttgatcggcttgccatccatgccgtagcgagtctggcggaaaataaccggtcccggtgagctcagtttcaccgccagcgcaatgcagcacagcaccggggagatcagcagcaggataagcgtcgccagcacaatgtcttctgcacgttttatcaggcggttaaccccggaaagcggcgtgtcatacagcggcaccaccggtacgccgttcatctcttcgagacgtgaatggagaatgttgaaggtaaagacatcggggatcagcagcaccgaacaggtggtgtccgccagttgatggaccagttttttcactcgcgcgccgtcgcacatctgcatcgcgatatagacgttatgaatcttgcccgctttcgcatcctcgaccagctgttgcagattacccgcccagtcgttagaaacgccacccggtttcgggtcgtggtaaacgcccaccacttcaaaccctaaccacggctgattacggaagctctccatcagcatttgtccggcggctaaatcccccgccaccgcgaccatgcgcttgttatagccatgattacgcagccagcccgccccaatacgaatacatgaacggcaaaccaccagtccgatgctggtcagcccataccacgccagccagattttcaattgcgtgtcgaaatcattgttgaacgccaccagtccggcgctgaaaatcacgcttaacgtccagttttgtagcaacagggcaaattctgtcgctgcccgaacaccgcgccatgagcgataaaaatcggtgatgccgcccagcatctggaacaccaccagcgtaatcagcgccaccaacaggtgcatgtagaggaatgacagtccgctcacttcgcaaaccagccatagcccggcaaacatgatggtgatatctgaaaagcgttgcaccatagagattaacgatgcattggttttcgctcgctcgcgcttttttagatttgtcatcgttgttcctgtttttagccccttacccgcagtgggggtaagggaagatccgacattactcgttcagcaacgtcagcagagttcgcgttcgcgcttccatcagcggcacatcaccgcgtgattccacattcaaccgcaccaccggttcggtgttggaggagcgcagattaaagcgccagtcggcaaaggtcatgctgatgccatcggtacgatccaccgccagtgcctcacggctaaaatgctgttccacgcggttaatcgcctcaacgggttgcgccagtttgctgttgatctcaccgcttgccgggaatgccgccatccggtcgcgcaccagttcgcccagcgtttttcctttcagacacaccagttcggcgaccagcagccacgggatcatgccgctgtcgcagtaagcgaaatcacggaagtaatggtgggcgctcatttcgccaccgtagatggcgtcttccttgcgcatacgttctttaataaaggcgtgtccggttttcgacattaccggggtgccgcctgcggcagtcaccacatcaacggtgttccaggagagacgtggatcgtggatgatcttcgcgccgggatttttttcgaggaacgcttctgccagcaaaccgacaatgtagtaaccctcgataaactgccctttttcgtcaaacaggaaacagcggtcaaaatcgccatcaaaagcaatgcccatatccgcgccgtgtttaatgaccgcattgcgggtgtcgtcgcgacattccggcagtagcgggttaggaataccgttggggaaattgccgtccggcgtgttatgcactttgattaactccaccggtgcgccgagggctttaaagcgggcttcaatggcgtccaccaccggacccgccgcgccgttcccggagttaatcaccagcttgagcggcgtgaggtttttgacgttgatataaccgaacaggtgatcaacgtaagcgtcacgcagattgatttgctgatagcgaccgcgtttggtttcatcgacgggaggaaagtcgttggcttctgccagacgctggacgtcgcgcagtccggtatcgccgctgatcgggcgagccccttcgcgcaccagtttcatgccgttgtaatccatcgggttatggctggcggtaacttcaatgccgccatccacaccgagatggaacgtggcgaaatagatttcttcggtgccggacataccaatatccagcacgtcgacgcccgcatcctgtaaacctttcgccagcgccagttttaaggtttcgctggtgaggcggacatcaccgcctaacacaatggttttcggtttgagaaattcgccataggcgcgaccaatgcgccaggcgatatcttcattcagttcttcgcctaatttcccgcgaatatcataggctttaaagcaggttaactttttcatatcgttaccctttttcaggcaatagttggccctgaccgaaacggccaattttgtttttgtcgttatttacatcgcggtttcgcattcattgcctgatgcgacgctgccgcgtcttatcaggcctacaaacccgaaccgtaggtcggataaggcgttcacgccgcatccgacaaacagcgcctgatgcgacgtttacacccgtccgtagcgatccgcgaagcgcaccacatcatcctcttcgagataagagccggagcgcacttcaattaaatcgagcggaattttccccgggttttccaggcaatgcgtcgcccccagcggaatataaatggactcgttttcaccaagcagtttgatatcaccgtcgatagtgacttttgccgttcccgcgacaaccacccagtgttccgcgcggtgatgatgcatctgtaccgacaaaccttcgcccggtttcacggtgatgcgtttcacctggtagcggtcgcccgcgtcgatagagtcatatttgccccacggacgatacacttcgcgatgcacccgatgctcatggcgaccatcggctttgatctgctcgaccacttttttcacatcctgcaccgcattacggtcggcaatcagcactgcatctttggtctgcactaccaccaaatctttcaccccgacggtggtgaccaggccagattcggcatacacatagctgttttcagttttgtgattaatcacatcgccatggcaaacgttgccctcggcggtgtgggcgctgatctcccataatgaagaccaggaaccgacatcgctccagcccgcatccatcggcaccacaacggcatctgccgtgcgttccatgaccgcgtaatccaccgactcttccggacaggcgagaaacgcctcttcatccacacgaataaaatcgagatccggatcgacggcgctcatcgctttttcgcaggcatcgagaatatccgggcgatattttttcagttcttcgagatagcgtccggcacggaacaggaacatgccgctgttccagtaatattcgccgcttgccacataggcctgagcggtttccagattcggtttttcgacaaactgcgccacttcaaaggccaccgtatcctgctcacccgcagacacttcaccgcgacgaatatagccatatccggtttcaggtagatccggcacaatgccgaaggtcaccagcttgcccgcttcagcatacggcatggcgttacgcacggcggcgcggaacgcatcttcgtcggcaatcacatgatccgccgccagcaccagcattaatgggtcgttctccgggctatgacgttttgccgccagcgccgccagcgcaatggcaggtgcggtgttacgccctgccggttcgagaataatgttctcggtgagtttgttcagttgacgcagctgttccgcgacaataaagcggtgctgctcattgcaaatcaccaccgggctttcgcactccacgccgttcaggcggcagatggtggtttgcagcatggtgagatcgcctttcaggcataaaaactgcttggggtaaagtacgcgggaaagcggccataagcggctaccggagccacctgccatcacaactggatagagtttcgactgcgccataattatccccgaatatcatttataaattgacgtaacacgttctctttatcgagcgtgcgttcggcatattcacgtgccaccgtgttgtgtttgggcagcaggaacgcctgacgaatccccgccaccagcgcctcgaccgattccggttccacgcaaaccgcaatgcccggaaaggtttcgcaaagctgccccagttctgtgtgggcttctgcggtaatcaccgcgttaccgcctaccgccagaatattggtcagtttcgacggcaatacggcatctgccgcgccgcgtttttgcaccaccagatggcaatcccccatcttcagcaatgcgggtaaagcgtcatacgattgcagcggaaaaaattgcatgttgcgcagtccacgctgctgcgccattttttccagccgcgctttgccgccgccctgcccgacaatggcaaaaataagcggttcatcgcgcaggcgatcggcagcttcaataacgttttccagcccctgcttttcaccaatattgccggagtaaagaatgatttttttgttatccggcaggccaagctggttacgaagggcatcaacatcggcgtctgcgacatgctgaaaacgggcaatttctgaccagttggggaagaagatgacgttttccgccgccacgcctttttcgatagctttattcatcattgagcgcgaaatcgtggagacgttatcgacgttatgcagtccgctacgttcgaacgccgttgccagctgtgccactttgccgcctttgccttttccggcaaggcccagccccagcatggcgtccacttcgtaatcctgaatatggagcaccgtgcgcgcaccagacagtttcgccagcagccgcattcccggcgtgcaaaacagcgttggcaccacgccgataatgcgatccggcttccagcgacgttgcgccatcagtggaaagaaactgctgacggcaaaactgccgagatgcaacaggcgtttcagggtgctcggctgttttggcacgtacagcgggcagcgccacaccgtggcggccccctcttcccgtttgtaccgccaggcggaatagttctcgcccacctgccactgcgggtagtaaggcggcgcggtaataacccgcacctcatgaccttgtgctgccaaccattccaccatctcgccggtgtacttgccgatgccggttaactccggcgagtagttaatgccgtagaccagtattttcataatccgggtactccggcacgcttctcagagagaaaataggcgcggctgttagcgtgaacattgtcactggcgagcaacgcgtccggcgtcagccagcggtaatcgtcatgctgctcatccggcagtaacagctcatcttccgctactctgaagcgaaaaccgagcaccacatagtgagtggtgaattccgtgccggagaagttatcgtcataaaagtgctgccagacaccgtaaaactggcctactgttatcggtagacgcagccccagttccgccatcgtcagccgctcaaatgcggcttccagcgtttcgtctttctgcacgcgccctcccggcacaaaccagtaaccctgcgccgggcggttggttcttttgccaagcagaaactcgccgcgactgttctcgacaataaagtcgagagagacaagcggtgtggagcgcactaccgtggcaaagtcttcctgacgtaaaaacatcattacccccgaaagcggtcttgattctcaaggaaccactggtaagtgctggcaagccccgcttccagtgagatttcgtgataccagccaagctgatgcaggcgcgtcacatccagcagtttgcgcggtgtgccatccggtttactggcatcaaaaaccacccgacctttgtaacccaccactttggcgatggtttgcgccagctcgcggatagtgcagtcaacgcccgtgccgacgttaatgtgcgacagcatcggccgggtgttctcctgccagacttcgtgcgccagctccatcacatgaatgctcgccgctgccatatcatcaacgtgtagaaattcgcgcatcggcgtaccgctgccccacaccaccacgtccggcgcattctgtgccgtcgcctcatggaagcgacgcagcaatgctgggatcacatgcgaattactcgggtggaagttgtcgtgtggcccgtacaggttggttggcatgactgagcggtaatcccgtccgtactggcggttgtaagattcacacagtttgatcccggcgattttggcaatggcataaggctcgttggtcggctccagcgtaccctgcaacaactcgctttctgccatcggctgttttgccagtttcgggtagatacaggacgatccgagaaacagcagtttgttcacgtcgttctgatgcgcggcgtgaatgatgttgctctcaatcatcatgttctggtagatgaaatccgccggataggtgttgttggcaacaatgccgcccactttcgccgccgccagatagacctggtcaatacgttcgctggcaaagaaatcatgcaccgcgcggctgtccagcaggttcagttcatcgcgggtgcgtaataccagctccacatcaccgcgctgttcgagctgtcgcctgatggcggaaccgaccattccgcgatggccagcgataaaaatgcgttgtttactcatgcttatgactccagcgcgatcgccacgtcgtagccgtgagatttcagcagagagtgttttttcgccgcttcgaggtcattagccaccatttcagacaccatctctctgagggtgatttccggtttccagcccagtttttcgtgcgctttggtcgggtcgccgagcagcgtttcaacttccgccggacggaagtaacgcgggtcaacggcgataatcacatcgcccggtttaacgcccggcgcgtcatgcccggtgacggaaaccacaatgcccttctcttcaacacccgtgccttcaaagcgcagtttgatgcccaactgtgctgccgccatttccacgaactgacgtacggagtactgaacgccggtcgcgataacgaaatcttccggttgttcctgttgcagcatcatccactgcatttttacgtagtctttggcatggccccagtcacgcagggaatccatattgccgagatacaggcacgactccagcctctgggcgatgttggcgattgcgcgggtgattttgcgggtaacgaaagtctcgccacggcgcggggattcatggttaaagagaatgccgttacaggcgtacatgccgtaggattcgcggtagttaacggtgatccagtaggcgtacagtttggcaaccgcatacggagatcgcgggtagaacggcgtggtctctttctgcggaatttcctgcaccagaccgtacagttcagaagtagaagcctgatagaaacgggttttcttttccagaccgaggaagcggatcgcctcgagcaggcgcagcgtacccatcgcatcgacgtctgcggtatattccggtgactcaaaagaaaccgcaacgtggctcattgcgcccaggttgtacacttcatccggctgcacttcacgcaaaatgcgcgtcaggttggaggtatcactcaggtcgccataatgcagatggaatttcgggttgcaggtgtgcggatcctgataaatgtgatccacgcgctcggtgttgaatgacgatgcacgacgcttaataccatgcacctcgtaacctttttccagcagaaactctgccaggtaagaaccgtcttgtccggttacaccggtgatgagagcgacttttgacatgtcttattcctctgtattttttgaatttattcagtttcaacgcgtttgcgtatcaccactgcggggttcccccggcaaaccacatttgccggaagcgatttaaaaacactgcttcgcgcacccacgacggtgccgtcgccgatcgtgacgccaggggcaacaaagacatcggttgccagccagcatttctcgccaatcacaataggcgtggcgttaatggtgaaatgttgacttgcatggtcgtggctcccggtgcataaataacttttttgcgatatcaccgaatgtgcgccaatggttatttcaccgagggtatataaattgacctcatcgccgacccatgcgtaatcacctaaggttaatttccacggataggtaatttttactgacggacgaataactacgttttttcctatttttgcgccgaataaacgtaataaaaatgcccgccagcgatacaatacttgtggcgaccaggcaaatattgttgcctgtactgcccaccacaattgcactttaatagcgttgccaccccggaaccctttcggcaccgagaatccacttaaatcctgcatcgttttcccttatattcagcttttgttatataaggctttcgtctttgaggtcgtatgttggcgtaaatgccaggataattcagcccaaaagccaggcacgtgcaatatctgccgttggacttttttggcgtcagcacacaattccatattattggtggtagataccccacccatagaaaattcagacaccaggccattgagttttttaaatgcataaccggctttatacattttggccgccagcgcgtaatcggaagaaactttatattccaggtcataacgccatttcttcaagccggacaccgggaaaaatatcgcctgatgactggcgggcaggctgtggtaaatataccaacccggtttggcgctacgtttaattttatgcccatcgccaaaatccagcagcgcatcgccggtgatcatcatgttatctttttgcacttttaacttacggacaaaatttgcggcatcctgatgaaaaatatcgcctgaattgagaaacagcgcgaacttgccttgcgccatttcaatacctttgttcatggcgtcgtagataccgttatctggttcgctgacaaagcgtaggttatagataccattgagattttccagatactcacgggtgccgtcgttggaaccgccatcaacaacaatccattcgaagctgataacgtccgcctgcgccagatgcgccagcgaggcatgtgttttgactatccctgcgaggttacgaaacgcgacagtgattatgctaagcaacatgttcttattcttacctcgtaatatttaacgcttttcgcaaaataaacggacagacgattaaaaatgcatattccgggctaaatatcgaaccggtaaaaaacagcgataccggagtaaaaagatataattgcacgcgaaaattgcggttatcaccaaaagcgttgatcatcatttttatcactttccccatgtaccacagtgataaaagcaccgcgaaccaggaaaaataaataatcagcagatacaaaccattgtctatggtttttccgacatccgcaccgttaaatattccgaatgatgcgacatattcataaagtgagccaaatctgactacaccgtcaatatgggtcaaagaataaccgaccatcaccagcggaccgacaatacgataatatgatgacgatccttccgtacctaaatcgcccagacgggtggaaatataaggaaatgcaattaccacaccaaccaggaatacagccatagaaatcaatgctaacggtaactttttcttaatcgcctctttattcagatattgaaatgcccactccagcaaataaaacaggataaaggtcataacccctgaaaacgatccggataatattatccctgcgagaatcatagcatcggttttaggcgttttaataccaaactgtttgatgctgagccaaattgagattaatgccagagcgaaaaatgccggttcgaaataaagtgctgtcgtgcgcttgccgccgaatttgatgaaattcagcacatagctgttgctgtaaatcagatatttcgaaatcgactccataatactgctgccaccggtgaggataatttgcgccatctccaccgccgccagcgccaccaccaacccgaccaccagataaaaaaagcgtaatatcttgcggtggttgtggggcgaaatcgttttaaagcgaatactccacaccatgccaataatgatcacaatatagacaaacagcatggttgaagtgacgtatttaccggcatccaacgactgaccaaacaggtagttaaacgccgtgagccccgcgccaatccctaaggcaatcatcaattttttaacgctgatgcgctctaaaaacagcagtaacaagacaggtaaaaaagtgacgatggtgatggggaaactttcgccaagctgggcgattttgacgttaaccagcaggtagatcagcggcagcagcaggtagctacagattctgatagaagttgacatactcctccagcatctgttgtccactgtaggcggcgcggctgcgctggctgaactcagccagcgtggtaccaaatatcgcctgtgcgatttccggtttgcttaactgcaccagttgcagcacctcttcttcgctgacggttttaccgccggatttttgcagcacttcccgcgccgcgtcgctatgggtggcaatcaccggcacgccaatcgataacgcctcacacaaaatcagcgggtagttatcgacgcgagaactgaacaccagcgcatccatctggttgagcgcgctcatcaacttgcgcttgtcagtttcaaagccgtgattaacaacgttaccagcggtgaacggcgagaacttaccgaaagtatgcagttcgattttgtcgctcagcgccatcatctcgcgcaccagttgctgcttagttttgccgtcgtaacgcagatcatgcgccaccactgcgattttcggcttgccctgggtttcgcgtaccggaggcaagtccgccagaatcgcttcggttgccatatcaatgccattattgataatccggcaacgccctggaccgtacagactattgaaagcatcagccacatgctggctgggggaaataaactgacagcccagtgccagcatctcgcggaataactggcgtttacccgccaccagctggtgcgcgcgatcaatcttcaccggtggatagttatttaaggtcgggcatttctggcagcccgttttccagccttcgcaaccgtcggtaaaggcgcagcgtccggtaacgctccaatggtcgtgtagcgtccagaccagagtgacatccggtttatggtttttcactttttcgcaaaagcgcaccacgctcttaagattcaaccagtagctgtgcagcacatgaaaatgcagaaccaccgggcccggtgtgcgagtaatggtgcgatataactcattgaaattgccgaacagatcgcgattaagcagacgaaacaacgcaatgttcgccatcgcggtcatccgtggcgtatgtttgatgacctgcggatagttctgatggctgacgctctctttgccgcctttgccgtagccgtagacaaaatgtgacgccagcccctgttgcagcgcgcgctggtggagatctaacgccacacctgctgccccgccttccgccagtcgcacattaaattgcagaatattcatttaattaccttcactcgcgctttttctcccaccaccagcgcgttgtccgggacagagtcgagcaccacgctgcccgcgcccacggtgacgttgttaccaatcgtgatatcaccaagaataatgacgttggcaccgagttcgacgccgttgccaatgtgtggacatgccatgttatcggcaccacgattgccgatagtgacgccgtgacgaatggtgaaatcatcccccgcgaccacgtttttattgatcactacggcgtaaccgtgatggatagtaaagcgtcggcctatggtcgcggcggcctggatttcataaccgaaaaagcattcggtgataatgcgatacagcaccagcagcggggccgcccaaagattgttgaggacgttctttttgcgccacaccgaacaaaaatgagcggcacgataggcaagaaccatgcagcacgggcgtaaactccagctgttggcgcgcagatcttccagcatctttagcgcccccgaataccatcagccagacgtttgccgttacgcaccgacagcagcgtcagcaaagtgcgccaggtcatgcgtttattgcggatctggtagagggtaaacagctgatattttttgctggcgcggtcgaatttgtctttgtgcttgcggtaaaagtggaagtatccggagaattttttcggtgacgaggtgatctgcatttcgccgtgattgatatgcaggatctgcgtcgcctcttccactttccacggttcgccgtactccaccaccatccgcaggaagatgtcgtaatcctgtgccgctttcagttcggtatcgaacaagcactctttgaaacgccacgcccaggtaaagacctgattgccaatgatattgcgtttgtaaaacaggcggcgtgaatacggcgatttgggatacagcggcaagcttgccggttgggaataaacttcgccctggcaaacgtagtcgttagcgtacaaaaaggcgtgagtgaccagttgctgtttatgggcgaggaagacgctcaggcggttgggtgtccattcatcgtcgtcatcgatcccggtgatgtattccccttgcgccagcataatcgcctggttacgtaccgcgcacgccccgctgttaatgtcgttgtgaatgtaagtgatgcgcggatcgttgagggcggtgacgtactgttgtagttgttcccaggaggtggagcaatcatccacgataatcatctcccagttgttgtagtcctggcgcaggaccgattttatcgcccgaatcgccagttgttggcggttccaggtcggcatatagattgaaatcagcggattgtctttcataggttgttctcccggcttatgagctggtttgcttgccggatgcggcgtgaacgccttatccggcctacggggcggtgcgaatgcaagcgtcgttatttcgcatccgacttatattcgtattcgtaatagccataatcctgatacgcgctggcgcggcggaagatggagttcagaatcacccctttcaccggaataccgttttgctcaaagcggctcagactggtttccacttctttcaatgtgttgaccgcataacgcgccaccattaacgtggttccgacatgacgaccaacaattgccgcatcggtcactgccagaatcggcggcgtatcaatcaacaccaggtcgtagtttttactcgcccagttcaccagttcggcaaagcgttcgctcatcaacagttcagaaggatttggcggtacctgaccgcgcgggatcaggtcaaatttggcaatagaggtcggtttagccgcggtagtaatatcgccctgtccaatcagaatttccgacaggccattaacgttattagtgcccaacagctcgtgggtgtaacctttgcgcatatcgcagtcgatcaacaacacccgtttattggtctggctaatcaccgccgccaggttggcgcagacaaaggttttaccgattgacgggctaaccccggtcatcatcaacacattgttctgtgcctgcatcatcgcgaagtgcaaactggtacgcagactgcggatggcttcaatcgccagatcggttggattccccaccgccagtagctggctctgtttatagcgtttaatccctttgatggttttgacgctatcgcgcgctttctgccactccgacagcgggatgctggcatagacactgataccgtgttcttccagcacctgcgggctttcgatgccgcgattaaacaacgagcgcagcagcacacccacgatagagagcatcaggccaaggataatcgccccgaggataatcagccctttcttcggttttagcacgccaggctgggtgattgccgggtcaacaatgcgcacatcgccgacggtgctggcttcggtgattttcagctcctgttctttattcagcagttgcatatagacctgctgcccagactcgacatcgcgggtcagacggacaatttcctgctgggttttcggcatcgccgttacgcgaccattaagtttggctttttcgtcttccagcgcctgccgtttctccagcagcgtgcggtacgccggatgaactttggtgtacagcttggagatttccgcctctttaaaggtcagttcgttcaactgcgcgtcgatgttcaccatcgaatcgagcaccgctttcgcttccagcggcagatcaacagaatctttatcctgacggaaggcattcagtttgttttcggcaacatcaaggcggctacgtacttccggtaactgttgcgcgaggaaggcgaggcttttcgacgcttccgccgatttgcgctcaatattttgctcctgatagttacgggcgatgctgttaagaatgtcgcggatctgttcgcgatcttcaccggtataagtcaagctcagtacgcctgcgtctttgccgttctccgttaccgtcaggctgttttgcagttggttgatcatccccagcgtggagtatttggtgacggtaaactcactccccgggctggcgtgaatagcttcaaccatcagcgtgacgccttcttttttcagcatctggcccgcttgcccacgggcgctaaagccgccatcactgctcagggtgtagtttttgtcatcaagcacattaagcgtaaacacccgatccgccatctctttcgggcggttaaaggtggtcactttcaccgtctcgttctgacgtcccatcaggcgatcccagcccgcaccgaaaatcgggaacgtgtttttgctcaccgcaatatcgaggtcgagatcgtccaccgttttaccaagcaccagacgcgaacgaatcaactggatctcggcgtccgatgctggcggtttgttggctaatgccgaaccaatgtcctgcactaacgaattgccactgttttgctcgatttgtaccagtgcgtcggcactataaatcggcgtggcgaagaaagtgtaaaccacggaacagagggcaaatacagcggtgatgccaatcacccaccagcgcgcttcaatgacggtgccgaccaggcgaccaatatcgatttcatcactgcccgttaccggagcggcatgttgttttactttttctgtcattcttatacctgctctgcgttcaatgcctgcgcccactggcgggcagaccgttcaagtaatgtgtacaccgctgcaaacgtttcccggcttttgcgatacggatcggggatttcacattcgttatcccagtgaccaaacagcatcactttgccgcgcatctcaggtgccatctcgcataagcgttcgatatggcgcttttccatggtcaaaatcaggtcgtagttgcgacacaggcgacggctgatttgccgtgcacagtgaccttccagagacagttgatgttctgcggcgacgctgatagcagtagggtcagcgcccttaccgaccagcgcgccgagtccagcggactccactttcagctccgggtgataacgttgcagtaagcgttccgccgtcggggaacggcaaatattgccgacacagacaactaaaatgttgttaaacatgacgattaccagttatgaatgtcgctggctgtatccgtcatgtaacggacaccgctaatagttggcagcaactgattgatcagacggttccagcgggataccggggcggtggtgacatacaccacgtcataaggttgcaggcggaattctgtcgccattaccagcgacgtcgcatcggacatatccagctggtagatattggcaatcttgccgttacgcccgctctcgcctttcagcggacgaatgacaaagatgccgctggcgttggaggtggtcatgtcgatgccttcagcattgcccagggcttcagtcagggtcatgccgctaaagtccattttcagggtgctctgtttcttcacttcacccatcacaaacactttcagatcatcattacgtggcacgtaaagaatatcgccggggtaaagcagtcggttctgattgaggtcgccgttttgcatcagcgcctgcaaagaaatgcgctcttcacgaccattgtgtgttagcaccacgttgcgccagtcagcggtgtcggtcaggccacctgcggcgttgatagcgtcgagaatggtcagaggcacgttggtaatcgcctgttgaccggatttattcacctgaccggagatataggctttttgcgagcggaaggcggcgatattaacgtccacctgcgggtcagagatgtacgtcgctaagcgcccggtaatatcactgcggatttcagcgagcgttttccccacgacgtgaaccttgccgatatacgggtagaacatggtgccgtcaggctgtacccagttgccggtgtcgctggagctgcggtactgaccggctggcgtggtgagttccgggtgatcccagacggtgacattaagaacgtcccccggcccgacgcgatactggtaattcgcgatctcactttccagcgtcatattggggcgcgctacgttgggtcgtgggcgtaattgatcaatcaggcgcggggttaacggataaacattcaccattttgtcgaggtcgaaatcagcgtcctgctgtttgatgacgtctttccccatcgtcgacatattgctgcccggaagtactgtgcaaccgcttatcaaggttactgacaccaataatggcatcaatttcattttggatttcatcattgtttatttatcactttggcagagtaattatcctgtgcactattaatagcaatgtcgccatgcacatttaccttgcagttaattgaataaaaatttaactggcatcagtcctaaaaaaattgatttcatccgcaggctattgacagaataattcagactggtctttcaggcatccagacacgctaccgcccctggctttttagctaccaatacactgatttagtttaatttttcaaaccctctctgcatacagtcgttgatgagaaagggttattgcggaaattaatttccgaatataaggtgacattatggtaattgaatattggctctccaataatgcaggaggaagtgttacagctaacggaatagcaggcaaggtaacaattcggcaattggctatttttaagaattatattaagtgtcattcaatatggtttttaggagtttctttaggttgacaatatttaatatggcgtctccacatgcgatatttcttaaataacactttattattaccacttataattcggggataatgtgaagttataaccctcaaataatatgagataaatagtgctgcaacattgcatttttgccccgatttatccatgatcgaattgtgacatttgtcatacaacgaataggttttgtacttactatggaatggattgccgatccgtctatctgggctggattaatcacgctgattgtgatcgaactggtcctcggcattgataacctggtctttattgccatcctcgccgaaaaactaccgcctaagcagcgcgaccgcgcacgggttaccgggctcctgctggcgatgttaatgcgcctgttactgctggcgtcaatctcctggctggtcaccctgactcaaccgctgttcagcttccgctcgtttacctttagcgcccgcgacttaatcatgctgtttggtggtttcttcctgttgttcaaagccacgatggagttgaacgaacggctggaagggaaagacagcaataaccccacacaacgcaaaggtgcgaagttctggggggtggtgacacaaattgtggtgctggacgccatcttctcactcgactcggtgattaccgccgtcgggatggtcgaccatttactggtcatgatggccgccgtcgttatcgctattagcctgatgttgatggccagcaagccgttaacccagtttgttaacagtcacccgacgatcgttattctctgcttaagcttcctgttgatgattggctttagcctggtggcggaaggtttcggcttcgtcattccgaaaggctacctgtacgctgccattggtttctcggtgatgatcgaggcgctcaatcagttggctatctttaaccggcgacgttttctttccgctaaccagacactgcgccagcggactaccgaagcggtaatgcgcctgcttagcgggcaaaaagaagatgcggaactggacgccgaaaccgcgtctatgctggtggatcatggtaaccagcaaatctttaatccgcaggaacggcggatgattgagcgggtacttaatcttaaccagcgtaccgtcagcagcattatgacgtcgcgccacgatattgagcatatcgatctcaacgcgccggaagatgagatccgccagttactggagcgaaatcagcatacgcggcttgtcgttactgatggcgatgacgcagaagatttgctcggtgttgttcacgttatcgacctgttacaacagtcactgcgcggcgaaccgctcaacctgcgggtgttgattcgccagccgctggtgttcccggaaaccttgccgttgttacctgccctggagcagttccgtaatgcccgcacacactttgcttttgtggtggatgagtttggctcggtggaagggattgtgacattaagtgacgtcactgaaaccattgccggtaacttaccgaacgaagtggaagagatcgacgcccgccatgatattcagaagaatgcggacggttcctggacggcgaatggtcatatgccgctggaagatctggtgcaatatgtgccgttgccgctggatgaaaaacgtgaatatcacaccattgccgggctattgatggaatatttgcaacgtattccaaaacctggcgaagaagttcaggtggggaattatttgcttaaaacgttgcaggtggaaagccatcgcgtgcagaaggtacagattattccgctgcataaggatggcgagatggagtacgaggtgtgatggcatgtaggcctgatgcgacgctttacgcgtcttatcaggcctacaggacagctcaccaggtaacctacatcttctccagcaacttcttcacatctttgccattgcgggaatctttattccgctcggcccagtcgttaagacggcgttttgcttcatcctgtagatgtttacgcagtaactgatccacttgcaggctgtaattaagttgctgccagttgccataaacccgcagcggtactggcgtttctttgaggaaatcaatcagtttgctttctccgttccagccacccacgacccgaatatcaaactgggtgtcgcaggtttgctccgccagattcaacgtaccagccccggaaagcgccagcatgggcgattgaccttgcatgtcgtttaacgtcacgacgccatccttcaacgtcaaatcggtggtaaagcggtcaagacgcgtcacgttatcgaagttttcagcggccttcacatcaccaccattacgttctaccgcttgctgaatcatctgctggaagttcatcccttccatgcgtgtgtcggtcatttcgacatgtgcctgtccttgccagttgtggcggaatgcgtcggcatctatgtcagcaccggagaaatcaccagccagtgacatctttccggtcaacgaaatcggatagttaaacgccttcagaatggtgccaatctcaacgttttccagccgtggctggaagtttatccgcggatttattgatgtcgcgtccaacgtgcccggcagtgaaacctgtccaccgttaagtttgccctgcagttgagtaatttccagcaaacccgacttgttggtcatttgcgtggcaacatctgtaaaattcattccgcgccagcgcacgttactggcctgcaacaaaatatcagccgtaaagccttgcagtccctgataggccggttcatcaatacgcgaagaaatgaccgggcgcggcaacgttgattggctctgcccttgctgcgcggcaccgttctcaccgttcgctgtttcattaagggggatgaggttgtcaagattcagttgcgggaattgcagtctcagctgccattccggtttctctgtcaacgtgacctgtgcttgcccgctcagcgtactgtcattggcggtcaaactaatttggttaaatgaaaggcgtttatgtgactcctgccactggacctggaaactcccctgcccctgaataccttgttttggtaaatcggcaccctgcaactgccagttaatttgttcaatagccgccgttaaatcatgcggataatcagaagcatccaccgtaccgttaagggataatgtgagatcgcgctgatcgcgattaacccgcccggaaaactcaaatgagccacgatgttggggatcttgttccatttgcaggcggatattgcggattgtcacctgctcgtcatcttcatgctggaacaccagaacgctgtccgccaccttaagactggatatatcaaacgaccatccgcgatcgtctgacagatccggcaaggtattgtcgcgcggtgcaaccggagcgtcttcactgcgcactgcttccgtctgcggcgtcagttggatcactgccccttttagcatcacctgcttaacgctcagttgatgactcagtagtggtaaaagcgccacgtccagacgcatgttgtcggcgcgaaccagtggctggcttgcgccctgggcggtgagagacattcgcccggagaggatactaagctgcggccagacgtgccaacgcagtggcccgtcgagctgcaattgataaccgctacgtgcagcaacttgcttgaccatatagtcgcggaaatcattcggattcaccagcaacactaacgcagataacccggccaccagcacgaccaggagtatcatcagcgtcgtcagaaatcgtctcatggtatcctcaatgggcctgaattagtctttatcgattcggctggctaccgcgccctgctggttgcgatatttcgcatcttcacggcggttgtaaggtcgcgccgccgggccggagagcggctcaaagctcagcgcaccaattaacatgcccggacgcagcgccagcggcagcttaccggagttgtaaaactccagcacaatgcagccagaccagcccggatcgatacggtgcgcggtgacgtgcaccatcagccccagacgcgccagtgaagaacgcccgtccagccagcccaccagatcggctggcagcgtcaccgactccagcgtcaccgccagcgccagctctcctgggtgaagatagaacgcctcgctttcatcgagaacgatctcatcgctcatcacgcggtcaagcgcggcgctcacttcatctttgggaccgctcagatcgataaacgctgccgtgtgaccacggaaggtacgaaatttattgcccaggcgcacatccaccgtcgcgccgttaatacgctccactggcggacgtgggttgatcgacaaacggccttcatcaagccaggcttcaatatctcggtcacacagacgcatggcattttctcctttcgagcatcactcccttaacgccaattacgtcaagggcataccaggttatcactgaacggtacacaatttatcaagcttattcaaagaactgacttattttcgctttcaatatatcgatcgcgatgcggtttttcccgccgcgcggcacgataatgtccgcatattgtttagaaggctcaatgaattgcagaaacatcgggcgcacggttttttgatattgcgccatcactgaatccattgaacgcccacgctcgttaacgtcacgcttgatgcggcgcatcaggcagatatccagcggggtatcaacgaaaatggagaagttaagttcgtcacgtaaacgcgcatccgtcagcaacaaaatgccttcgagaatgatgaccttcttcggctcaaccgtcaccgtttctttcatacgcgtatgttcaacatagctgtaaaccggcaggtcaattgccgagccgcgtttcaacgcttgtaaatgctcaagcagcaggctgtgatccatcgcgctgggatggtcgtagttggtcttaacgcgttcttccatcgacagatggctttgatctttgtaatagcagtcttcgggaattacgccgatgtgttcatcaccgacttgctcacgtaattcacgataaagggtactggcaataagactcttgccggaagccgatgcgccagcgataccgataatgacgcactgatgagactgatcagtcatatatttagcgacctgattaacctggatgttaggaagggggcgacgaagcgccaaacgcggcaattatagggatttcatccgcctgataccagtcgaatagcgttgccgcgcgctcagagttaattgttgacgaagaattcccggtggcaaattacgttgatcagttttatacaaggtaaaaaatgttatacgcagttgcgcaaattatccgcctttacgtcactttatgagcaattcgcatataaaatgtaaaacttttgtactagcataaacacagaaacgaatactggcgacctggccttgcggataaagcggtaatgagcaaacaatcacagcatgtattaattgccctgccccacccgctgcttcacctggtcagtttaggtttagtctcgtttatcttcacccttttctcacttgagctttcgcagtttggcacccaactcgccccactgtggttcccgacctccatcatgatggtggcgttttatcgccatgccgggcgcatgtggccgggaattgcgctgagctgctcgctgggaaatatcgccgcatccatcctgcttttttccaccagctcgctgaacatgacctggacgaccatcaatattgttgaagccgtggtcggggcagtgctgctacgtaaattgctgccgtggtataaccccttgcaaaatctggctgactggctgcgtctggcactcggcagcgccattattccgcctctgttggggggtgttctggttgtcctgctgacgcccggagacgatcctctcagggcatttttgatatgggtactgtcagaatccatcggcgctctggcactggtgccgctgggattgttatttaaaccacactatctgctgcgccatcgcaacccaaggttgctttttgagtcgctgctcacgttagccatcacgctgacgttaagctggctttcgatgctgtatctgccgtggccttttactttcattattgtgctgttgatgtggagcgccgtgcgcctgccacgaatggaagcctttttgatcttccttaccacggtgatgatggtgtcgctgatgatggccgcggatccctccctgcttgctacgccgcgtacgtacctgatgagccatatgccgtggctaccgtttttgctgatcctgctgcccgccaacatcatgacgatggtgatgtatgcctttcgtgcggaacgcaaacacatttccgaaagcgaaacccgctttcggaacgcgatggaatattccgctatcggcatggcgttagtgggcaccgagggacaatggctgcaatccaacaaagcgctctgccagtttctcggttacagtcaggaagagctgcgcggactcacctttcagcaactgacctggccggaggatctcaataaagatctccaacaggttgaaaagctgataagcggtgaaataaacacctattcaatggaaaaacgttactacaaccgcaatggcgatgttgtctgggcgttgcttgccgtctcactggtgcgccacacggatggcacgccgctctattttatcgctcagattgcagacattaacgagctaaaacgcaccgaacaggtcaatcagcaactgatggagcgcatcacgctggccaacgaagcgggcgggattggcatctgggagtgggagctgaagccgaatatttttagttgggataagcggatgttcgagctgtatgaaattcctccgcatatcaaaccgaactggcaggtgtggtacgagtgcgtgctgccggaagatcgccagcacgccgaaaaagtgattcgtgattcgttgcaatcacgctcgccctttaaactggaatttcgcattgccgtgaaagatggcatccgccatatccgcgccctcgccaaccgggtactgaataaagaaggcgaggtcgaacgcctgctcggcattaatatggatatgacggaggttaaacagcttaacgaggcattgtttcaggaaaaagagcgcctgcacattacgctggactccatcggcgaagccgtggtctgtattgatatggcaatgaaaattacctttatgaatccagtggcggagaaaatgagcggctggacgcaggaagaagcgttaggtgttccgctcctgacggtgttgcatattacttttggcgacaacggaccattaatggagaacatttacagtgctgacacctcacgttccgcgatcgaacaagatgtggtattgcactgccggagcggcggcagctacgacgtgcattacagtattacgccgttaagtactctggacggcagcaatataggctcggtactggtgattcaggacgttaccgaatcacgcaaaatgctgcgccagctgagctacagcgcctcccatgatgcactgacgcatctcgccaatcgcgccagttttgagaagcaactgcgtatcctgctgcaaacggtaaacagtacgcatcagcgacatgccctggtgtttatcgatcttgatcgctttaaagcggtgaatgacagcgccgggcatgcggcgggcgacgctttactgcgcgaactggcgtcgttgatgctgagtatgctgcgctccagcgacgtgctggcgcggctcggtggtgatgaatttggtctgctactgccagactgcaatgttgaaagcgctcgttttatcgctacacgcattatcagtgccgtgaatgactatcactttatatgggaaggacgtgtgcatcgggtaggtgccagtgccgggattaccttgattgatgacaacaatcatcaggcagctgaagtgatgtcgcaggctgatatcgcctgttatgcctccaaaaatggtggccggggccgggtgacgatttacgaaccgcagcaagctgccgcacatagcgaacgggcagcgatatcgcttgatgaacagtggcggatgattaaagagaatcagttgatgatgatcgcccacggcatcgcttcgccacggctcccggaagcaagtaatttgtggctgatttcacttaagctctggagttgcgaaagcgagattattgatgaacaaacatttcgtcgtagcttcagcgatccggcacttagccatgctcttgaccaacgggtatgccacgattttttccagcaggccgcaaaagcggttgccagtaaaggcttaagcatcgcccttcccctttccgttgctggtttgagtagcgccacgctggtgaatgaactgcttgagcagctggaaaatagccctctaccagcacggttattacatctgattattccggcagaagcgattttcgatcacgcagaaagcgtgcaaaaactgcggctggcgggatgtcggatcgtattcagtcaggtaggccgcgatctgcaaatcttcaactcgctgaaagcaaatatggcagattacctgctacttgatggtgagttatgcgccaacgtgcagggtaatttgatggatgagatgctgattacgattattcaggggcacgctcagcgactcgggatgaaaaccatcgccgggccagtcgttttacccttagtgatggatacgctttcgggcatcggcgtcgatctgatttatggtgatgtgattgccaatgcccaaccgctggatttgctggtgaatagaagttatttcgcgattaactaagggagcgtttgcccattgcctgatgcgacgctaacgcgtcttatcaggcctacaaatcgctcattccccaggccggataaggcgctcgcaccgcatccggcgaccaacgtcatgcttcgtctggttgccagccttccgtataccagatatgcaacagcgcataagaacgccagggcttccagcgttcggcataacggcggatttgtgccggcgtcattcccggaaatcgctgtttaatcagataatcatccggcagaaaaacatctttcgcctgccagccacgcaaagcaaaataatttgcagtccagcgcccgatacccggaaaggtttgcagcgttttcatcgcttgttctacgtcgcccggtattgtcattggtaaggtgccctccagcgccgcatttgccagatgaatcagcgcctctgcccgtttcaacggcatacctaacgcttttaatgcctgcaggtcggctactgccagccgctgaggcgtggggaagcagacataatccggaaaatcatccagccgttcgccataaagctgtgccactctggaggtcaattttgccgccatcgccacgctcaccagttggcctaaaatcgcccgcacgccctgctcaaaagcgtcaacacaaccaggtaaacgcaatcctggccgcgccgcgcctaacttgcccaacgcaccgttaacaatctgcgggttacattgcagatcaaacaggcggctcattttcgccagacactctgcggcaacaggttctaaacctgcacttaaatttatgtgcagagtatggcgggctatatccggaatagcagtcaccacgccgcgatattcgcctaccgccagactacgggcataataactgtccgcgaccgtttccacgccgctcaccgcacgggcggcgagaaatcccaacatccacgaccagtcatacggcggctgccagttcagggtatacatcgcatctccttgttaatccgctttcagcataaacgttattcagacgttacgctttgctttcatattccggttgtcgcgacggcaacatttcgctaaagtcacgccccttcttcaccggcatggggattatttcgtgtttattggttttgattacggtacagcaaactgttcagtggcggtcatgcgcgacggtaaaccgcatttgctaaaaatggaaaacgacagcacgctgctgccttcaatgctttgcgcgccaacgcgtgaagctgtaagcgaatggctgtaccgccatcatgatgttccggcagacgacgatgaaacgcaggcgctgttgcgtcgggcgattcgttataaccgcgaagaagatatcgatgttacggcgaaaagcgtgcagttcggtctttcctcactggcacagtacattgatgatccagaagaagtgtggtttgtgaaatcaccaaaatcgttcctcggtgccagcggcttaaaaccgcagcaggtagcgctgtttgaggatctggtctgcgcaatgatgttgcacattcgccaacaggcgcaggcgcagctgccggaggcaattactcaggcggtgattggtcgcccgatcaacttccaggggctgggcggtgatgaagcaaacacccaggcgcaagggattctggaacgcgcggcgaagcgtgccgggtttaaggatgtggtattccagtacgagccggtcgcggctgggctggattacgaagccaccttgcaggaagaaaaacgagtgctggtagtggatatcggcggtggtacgactgactgttcattgctgctgatggggccgcaatggcgttcgcgtctcgatcgtgaagccagcctgctgggtcatagtggttgccgtattggtggtaacgatctggatatcgcactggcgtttaagaacctgatgccgttactgggcatgggtggcgaaaccgaaaaaggcatcgccctgccgattctgccgtggtggaatgcggttgcgatcaacgacgttcctgcgcaaagtgatttctacagtagtgctaacggtcgtctgcttaacgatctggtacgcgatgcccgtgaaccggaaaaagtggccctgttacagaaagtctggcgtcagcgtttaagctatcgcctggtgcgtagcgcagaagagagcaaaatcgccctttcaagtgtagcggaaacccgcgcctcactgccgtttatcagcgatgaactggctacgctgattagccagcaagggctggaaagcgccctcagccagccactggcgcggattctggaacaggtgcaactggcgctggataacgcccaggaaaaaccggacgttatctacctgaccggcggtagcgcccgttcgccgctgattaaaaaagcgctggcagaacagttgccgggcattccggttgcaggcggcgatgactttggctccgtcaccgccgggctggcacgctgggcggaagtggtgtttcgttaattgaaaaatggctcagcaacggcttaaatctgcctgcgcctgagccagtttttctgccgcctgacgtagcggttccatcaacggcatggtccgtgctggcgcatgaaggcggaatcgctgcaactctgtcgcaccgacagtcagcgccgattccagccgatgtcgtttggcggctatttttgccattaccgcttgtctgtctgcaggcgttaccgcttcgttcggcctgaacacaaaacggcgttcacagctcgctttccagtcgataaccgcctgggtcagatgatcaccaaaaccttttacttgcttaacgctccgtcgggtaacatccgctgctgtttcaataccaaaggaccgtaacgccgctttacgcgcagggccaacgctgggaatagaggcaacatcaataaaaaatccctccagaaacttctgcttctgccgttcccttgcggtgtcgtgaagtgctaccagagcgcgtttctcttcttccggtaacccgagaatttcgtccttcattttttcgagcatcgcccgtttggcgataaaaccttccagcccgcccaagtgttggatctggctgactaaatggtcatagtccattttcgcgcgattaaacgcctcacggcgttgctggatttctgctttgtacgctttgcttgtcaggctgccaataatccagatagccgccagcacaggaatcaaaataatataacgcggttctgcctgaaggccgcaaagcaacagcgataacgctgacagtgcgatctcaatcagaatgatgtattcgcgccgtaacaggcctgaaggaagcggcctgccagtcggttggaaatgatcgggtaatggcagttgcaatgctggcggtgctactgatgccatcaccatcgcccagactctcgccagcacaaaatcaccgccggtggtaatgacctcttcgccgagatcaataaaatagataacgccttgattatccagcgcacaccacgggcagtcagtcaaatgagcggggtaaacatgcattgccgaaacggtacatttctttaactgttggcgtagtaaatcaagtgccgctacccacgcttttgccgtcggacgcccggttgccacgccactttccgtgaatgcctgctgaaacatggcttcaacatcgcccggtaacatcgacagcggaatcgatcgtggcggcggttttaaaccacgtcgctgattatctgaggcgtaggcataacggaaatgggcaatatccgtctccagcgcattacctgcatcagagataagcggtacaccggaataaggatgccgcccaccaaacaagatgtgaaaaatcagcaacgcaaggccaaaattatcgtgattcgcggtacgttcaaaaccgacaaatgatggcaaggtttgtagctctggcggcgtaaaatgcgacacgccgacttcgcataaatgcagtgtgccattggcgttaatctgaaaggagtcactatcgatcaacaccactttgctgtcgcgacctaccataaagctgttctggtttacgtcccccacgacgtgcccgtgctcgtgaaccgtagcaaaagatgaagcaatattgcgcgcaacatagagtagaaaatcccacgcacaatgagggtaactctggcgacgatgtgccgggctatagatcatatgaatcggttctttaccagaaacttttggcatcataaaaccgataacttttccgcctcgtccaccgtgaagcgttgcctgcggccaggcgacataattcaacaactgcgcgtcagctgtcgcagccataaaggcaagtttgtcctgttttaaggcgggtggcggcgtgtgataaatcttggcgacgctatcgacaaactcctcgatatcataaaccgcaccttcgccgcctttgcccagttcacggcctggcgtaacgcactcaccagtagcagtatataaagtgggtttcatggtaaccacatagccagtgccaacgttttatcatcatccgtacgctcgtttaccgccgggctggacaaaaactgctttaacaattcaggtaataaatcgagttgttcctgcgttgctgacgccagtccattgaaaaacggggtaaagaaaggcacatgcggagaattatccagcatatttaacgccagtcgctgaataccatccgtaaatgctgcaactttatgcgcgcgctcagtgctggtgaaagtttccagtctggaaacggcatcttcatcagtaatgaagtgcgtcatattggcatattcccccaccatcggcgtgagcggcagttgcaaaccgtgccccaaatctaccaccacgccgccatcgccaatctgcataatcaaggtgccattagctgatgaaatcaatcccaaaaacgtgcaggcaaaatcgcgaaccgctaattctttggcttccgcctcggcaaaaagtcgctgacgaatggtcagcacaatgtccgttgcgaggacatcattaagccccaattccccgccctgcactttttgcgacatataagccatcgcttcattgacggcgagcatcgcaccttcgcctccctgcgaggcgctacctgcgccatcagcgacaaataccgacaataatggctgctggtcatttagccaggcaacctgtatctggcaggcatcctggcaaggcaagtccgcactgatgtgcgacgttccaacggctgatgcatagaccagtcgccagctcacactgacgtccagccttttggcgcttccagcacaacttccgttcccggcgtggagcgggaaaccgaacgcagcgaactggataaccagctaaacagttcacggaattgtaatccctgcagtggcaaaggctgacgaacgctgatttgtgccagcgtcttcatatccgccccctgaacgccgatggtaaagaaggcaaacttcttatcttcttccccctgaaacactttgttggcggcagcctgccactcatcggttggtgcaccatcggtgatcaggaaaatccacggacgataataggaaataccattggcacgatattcacgtttccgctcctcaaccatatccagggctttggtaatggcagagcccattggtgtatcgccctgggcaaacaggatgggcgggaaaaaattagcggcgctggtaaagggttgttccacatgcaccgggccgaacgtcacaatgccgagttccactctttttaaggccagcgaatcggcaagcagctcatcgcgaaaggtaaccaatccggcgttaagttcattaatgggtctaccgttcatagaaccagaaacatccagcagcaaaatgcaggggcaacgtggttccgggttactggcaaaatcgctggtggcaaacgtgatttgttcgctcataagaaatcctttcttagagaattattgaggtccagtatcataccgactgcaataatgaaataagagcaaacgaagaaactttcagaattaggcccggcagcgcagaagattttgctattcgcctcgcaagaacgtgggcttacagattgacaacaagggttgagtgacataatttcaggagtgagggtagagcggggttttccccgccctggtagtcttagtatgctgggtagctaatgactaagagcaccacgatgatgagtagcttcatcatgaccctttccttatttaaggccccttcctcgggaggggctttcccgtttcagcgtcccgctgaaatcttcggcttacctcctttcgccctgtatgcagtctatcgctgacttgcggataaaatagtttcaagtgtgattattgcgtaacgactcgcaaagaatatttgctggcaggatcgcagactgcaaagtctgcggattgacaattggaccgtgaaggcatactttcaggaatgagggttgagcggggtttcccccgccctggtagtcttagtaagccgggaagcttatgactaagagcaccacgatgatgatccacttcatcatgaccctttccttatttatggccccttcctcgggaggggctttcccgtttcagcgtcccgctgaaatcgtcggcttatctcctttcgccatgcaagcagtctatcgctaacgcgtagataaaatagtttcatgtgttattactggatgtgtgctcgcaaaagtgcccgtcattcagacgattcccgacagtgtttcataattcctccatttttctcccttattggctggctacactagtatcattccgcgaaacgtttcaggaagagaaactcttaacgatgaaaggcagttataaatcccgttgggtaatcgtaatcgtggtggttatcgccgccatcgccgcattctggttctggcaaggccgcaatgactcccagagtgcagcccctggggcgacgaaacaagcgcagcaatcgccagcgggtggtcgccgtggtatgcgtgccgacccattagccccggttcaggcggcgaccgcagtagaacaggctgttccgcgttacctcaccgggcttggcaccattaccgccgctaatactgttacggtgcgcagccgcgtggacggtcaactgatggcgttacatttccaggaaggccagcaggtcaaagcaggcgatttactggcagaaattgacccaagccagttcaaagttgcattagcacaagcccagggccaactggcaaaagataaagccacgctcgccaacgcccgccgtgacctggcgcgttatcaacaactggcaaaaaccaatctcgtatctcgtcaggaactggatgcccaacaggcgctggtcagtgaaaccgaaggcaccattaaggctgatgaagcaagcgtcgccagcgcgcaattgcaactcgactggagtcgcattaccgcaccagtcgatggtcgcgttggtcttaagcaagttgatgttggtaaccaaatctccagtggcgacaccaccgggattgtggtgatcacccaaacacatcctatcgatctggtctttactttgccggaaagcgatatcgccaccgttgtacaggcacaaaaagccggaaaaccgctggtggtagaagcctgggatcgcaccaactcgaagaagttaagtgaaggcacgctgttaagccttgataaccaaatcgatgccactaccggtacgattaaagtgaaagctcgctttaataatcaggatgatgcgcttttccctaatcagtttgttaacgctcgcatgttagtcgataccgaacaaaacgccgtggtgatccccaccgccgcactgcaaatgggcaacgaaggccattttgtctgggtactgaatagcgaaaacaaagtcagcaaacatctggtgacaccgggcattcaggacagtcagaaagtggtgatccgcgcaggtatttctgcgggcgaccgcgtagtgacggacggaattgatcgcctgaccgaaggggcgaaagtggaagtggtggaaacccagagcgccactactccggaagagaaagccaccagccgcgaatacgcgaaaaaaggagcacgctcctgatgcaggtgttacctccgagcagcacaggcggcccgtcgcgcctgtttattatgcgtcctgtcgccaccacgctgctgatggtggcgatcttactcgccgggattatcggttatcgcgccctgcccgtttcggcgctgccggaagtggactatccaaccattcaggtggtcacgctttatccaggtgcgagcccggatgtcatgacctctgccgttaccgcgccgctcgaacgccagtttgggcagatgtccggcctgaaacaaatgtcgtcgcaaagttccggcggtgcgtcagttatcaccttgcagttccagctaaccttaccgctggatgtcgccgagcaggaagtgcaggccgcgattaacgctgcgaccaacttgttgccgagcgatctgcctaacccgccggtttacagcaaagtgaacccggcagatccaccaatcatgacgctcgccgtcacctcaaccgccatgccaatgacgcaagtggaagacatggtggaaacccgcgtcgcgcagaaaatctcgcagatttccggtgtcggcctggtgacgctttccggcggccagcgtccggctgttcgtgtcaaacttaacgctcaggcgattgccgccctcggcctgaccagcgaaaccgtgcgcaccgccattaccggcgcgaacgttaactcagcgaaagggagccttgacggcccttctcgtgcggtcacgctgtcagcgaatgaccagatgcaatcggcagaagagtatcgtcagttgattatcgcttatcagaacggcgctccaattcgtcttggcgatgtcgctactgtagagcaaggagcagaaaacagctggctcggcgcgtgggcgaacaaagaacaggccattgtgatgaatgttcagcgccagcccggtgctaacattatctccaccgccgacagcatccggcagatgctgccacagctcaccgagagtctgccgaaatcggtgaaggtgacagtactttctgaccgtaccaccaatattcgcgcatccgtcgatgatactcagtttgaattgatgatggctatcgcgctggtagtcatgattatctacctgtttttgcgtaatattccggcgaccatcattcccggcgtcgcagtgccgctgtcgttaatcggcaccttcgcggtcatggtgtttctcgatttttcaatcaataacctgacgctgatggcactaaccatcgccaccggatttgtggtcgatgacgccatcgtggtgatcgagaacatttcccgctatatcgaaaaaggcgaaaaaccgttggcggcggcgctcaaaggcgcgggtgaaatcggctttaccattatctcgctgaccttctcgctgattgcggtgttgatccccctgctgtttatgggcgatatcgtcgggcgactgttccgcgaatttgctattaccctggcagtcgcgattttgatctcagcggtggtgtcgctgaccctgacaccgatgatgtgcgcacggatgctcagccaggagtcgctgcgtaaacagaaccgcttctcccgtgcctcggagaaaatgttcgacaggataatcgccgcctatggtcgtggactggcgaaagtgctgaatcatccgtggctgaccttaagcgtggcgctcagcacgctgctgcttagcgtgctgctgtgggtattcattccgaaaggtttcttcccggtgcaggacaacggcattattcagggcactttgcaggcaccgcaatccagctcctttgccaatatggcccagcggcaacgccaggtcgcggacgtgattttgcaggatccggcagtgcaaagtttgacctcatttgttggcgttgatggcactaacccgtcgctgaacagtgcgcgtttacagatcaatctcaaaccactggatgaacgagatgaccgggtgcaaaaagtcatcgcccgtctgcaaacggcggtagataaagtgccgggcgtcgatctcttcctgcaaccaacgcaggacctgactattgatactcaggtcagccgcacccagtaccagtttaccttgcaggccacgtcactggatgcgctcagtacctgggtgccacagttgatggaaaaactccagcagctgccacagctttctgatgtctccagcgactggcaggacaaagggctggtggcgtatgtcaatgtcgacagggacagcgccagccgcctggggatcagcatggcggatgtcgataacgccctgtacaacgcgtttggtcagcgactgatttccactatttatactcaggctaaccagtatcgcgtggtgctggaacacaacaccgaaaataccccaggcctcgcggcgctggataccattcgcctgaccagcagcgacggtggcgtggtgccgttaagctcaattgccaaaattgagcagcgttttgcgccgctttccatcaaccatctggatcagttcccggtaacgactatctcctttaacgtgccggataactattcgctgggcgatgcggtgcaggcgattatggacacagagaagacgctgaatctgccggtggatatcaccacgcagttccagggcagcaccctcgccttccagtcggcattgggcagcactgtctggctgattgtcgcggcggtggtggcgatgtatatcgtgctcggcattctgtacgagagctttattcacccgatcaccattctctcgacgctacccaccgcaggggtcggcgcgctgctggcgttaatgattgccggtagcgaactggatgtgattgccattatcggcattattttgctgatcggtatcgtgaagaagaacgccatcatgatgatcgacttcgcgctggctgctgagcgcgagcaaggcatgtcgccgcgcgaagctatttaccaggcttgtctgttgcgttttcgtccgatcctgatgactactctggcggctctgcttggtgcgctgccgctgatgttgagtaccggggtcggcgcggaactgcgtcgtccgttaggtatcggcatggtcggcggtctgattgtcagccaagtgctgacgctgtttaccacgccggtgatttatctgctgttcgaccgtctggcattgtggaccaaaagccgctttgcccgtcatgaagaggaggcgtaagtgaagttttttgccctcttcatttaccgcccggtggcgacgattttactgtcggtcgccattaccctgtgcggcatactgggtttccgtatgctgccagtcgccccgctgccgcaggtcgattttccggtgatcatggtcagcgcctcgctgcccggtgcgtcaccagaaacaatggcgtcttccgttgccacgccgctggagcgctcacttgggcgcattgccggagtcagcgaaatgacctccagcagttcgctcggcagcacgcgcattattttgcagtttgattttgaccgggatatcaacggcgcagcgcgcgatgtgcaggcggcgatcaacgccgcgcaaagtctgctacccagcgggatgcccagccgtccgacctatcgcaaagcgaacccgtcggatgcgccaattatgatcctcacgctgacatccgatacttattcgcagggtgaactgtacgatttcgcctcgacgcagctggctccgacgatttcgcaaatcgacggtgtcggtgatgtcgatgttggcggcagctcgctgcccgccgtacgcgtcgggctgaatccgcaggcgctgtttaatcagggcgtctcgctggacgacgtacgcactgccatcagcaatgccaacgtgcgtaaaccgcagggggcgctggaagatggtactcaccgctggcagatccagactaacgatgaactgaaaaccgccgctgaatatcagccgctgattattcattacaacaacggcggcgcggttcgtctgggcgatgtggcgacggtgaccgactcagtacaggatgtgcgcaacgccgggatgaccaacgccaaaccggctattttgctgatgatccgcaagctgccggaagccaacattatccagacggtagacagcatccgcgcccgtctgccggaattacaatccaccatcccggcagcaattgatctgcaaattgcccaggatcgctcccctactatccgcgcgtcgctggaagaggttgagcagacgctgattatctcggtggcgctggtgattctggtggtgtttttgttcctgcgttcgggtcgcgccaccattattcccgccgttgcggtgccggtttcgctgattggtacgtttgcggcgatgtacctgtgtggtttcagtctcaataatctttcgttaatggcgctcaccatcgccactggctttgtggtggatgacgccatcgtggtgctggaaaacattgcccgtcatctggaagcggggatgaaaccgctacaggccgcgctacaaggtactcgcgaagtcggctttacggtgctgtcgatgagtctgtcactggtggcggtgttcctgccgctgctgttgatgggcggattgccgggtcgcctgttacgcgagtttgccgtgacgctttctgtcgccattggtatttcgctgctggtttccctgacgttaacgccgatgatgtgcggctggatgctaaaagccagcaagccgcgcgagcaaaagcgactgcgtggctttggtcgcatgttggttgctctgcaacaaggctacggcaagtcgctaaaatgggtgctcaatcatacccgtctggtgggcgcggtgctgcttggcaccattgcgctgaatatctggctgtatatctcgatcccgaaaaccttcttcccggagcaggacaccggcgtactgatgggcgggatacaggctgaccagagtatttcgtttcaggcgatgcgcggtaagttgcaggacttcatgaaaattatccgtgacgatccggcggtggataatgtcaccggctttaccggcggttcacgggtgaacagtggaatgatgtttatcacccttaaaccacgcggcgagcggagcgaaacggcccaacagattatcgatcgcttgcgtaaaaaactggcgaaagaaccgggagcgaatctgttcctgatggcggtacaggatattcgcgttggcggacgtcaggctaacgccagttaccagtacacgttgttatccgacgacctggcggcactgcgcgaatgggagccaaaaatccgcaaaaaactggcgacattgccagagctggctgatgttaactccgatcaggaagataatggcgcggagatgaaccttatttacgatcgcgacactatggcgcgattgggaattgacgtgcaagccgccaacagcctgttaaataacgccttcggtcagcggcaaatctcgaccatttaccagccgatgaaccagtacaaagtggtgatggaagttgatccgcgctatacccaggacatcagtgcactggaaaaaatgttcgttatcaataacgaaggaaaagcgatcccgctgtcgtatttcgctaaatggcaaccggcgaacgctccactgtcggtgaatcatcagggattatcggcggcctcgaccatttcgttcaacctgccgaccgggaaatcgctctcggacgccagtgcggcgatcgatcgcgcaatgacccagcttggtgtgccttcgacggtgcgcggcagttttgccggaacagcgcaagtgttccaggagacgatgaactcacaggtgatcctgattatcgccgccatcgccacggtatatatcgtactgggtatcctttacgagagttatgtgcatccactgacgattctctccaccctaccctcggcgggcgtcggagcgctgttggcgctggagctgttcaatgccccgttcagcctaattgcgctgatagggatcatgttattaatcggcatcgtgaagaaaaacgccattatgatggtcgattttgcgcttgaagcccaacggcacggtaacctgacgccgcaggaagctattttccaggcctgtctgctgcgttttcgcccgattatgatgactaccctggcggcgctgtttggtgcgctgccgctggtattgtcgggcggtgacggctcggagttgcggcaaccattggggatcaccattgtcggcggtctggtcatgagccagcttctgacgctgtataccacgccggtggtgtatctctttttcgaccgtctgcgactgcgtttttcgcgtaaacctaaacaagcggtaaccgagtaaatgacagatcttcccgacagcacccgctggcaattgtggattgtggctttcggcttctttatgcagtcgctggacaccaccatcgttaacaccgcgcttccctcaatggcgcaaagcctcggggaaagtccgttgcatatgcacatggtcattgtctcttatgtactgaccgtggcggtgatgctgcccgccagcggctggctggcggacaaagtcggcgtgcgcaatattttctttaccgccatcgtgctgtttactctcggttcactgttttgcgcgctttccggcacgctgaacgaactgttgctggcacgcgcgttacagggcgttggcggcgcgatgatggtgccggtcggcaggttgacggtgatgaaaatcgtaccgcgcgagcaatatatggcggcgatgacctttgtcacgctgcccggtcagatcgggccgctgcttggcccggcgctcggcggtctgctggtggagtacgcatcgtggcactggatctttttgatcaacattccggtggggattattggcgcgatcaccacactgatgttaatgccgaactacaccatgcagacgcggcgctttgatctctccggctttctgttgctggcggttggcatggcggtcttaaccctggcgctggacggcagtaaaggtacaggtttctcgccgctggcgattgctggcctggtcgcagttggcgtggtagcactggtgctttatctgctgcacgcccaaaataacaaccgcgccctgttcagtctgaaactgttccgcactcgtaccttttcgctgggcctggcggggagctttgccggacgtattggcagtggcatgttgccctttatgacaccggttttcctgcaaattggtttcggtttctcgccgtttcatgccgggctgatgatgatcccgatggtactcggcagcatgggaatgaagcgaattgtggtacaggtagtgaatcgctttggttatcgtcgggtactggtggcgaccacgctgggcctgtcgctggtcaccctgttgtttatgactaccgctctgctgggctggtactacgttttgccgttcgtcctgtttttacaaggaatggtcaactcgacgcgtttctcctccatgaacaccctgacgctgaaagatctcccggacaacctggcgagcagcggcaacagcctgctgtcaatgattatgcaattgtcgatgagtattggcgtcaccatcgccgggctgttgctgggactttttggttcgcagcatgtcagcgtcgacagcggcaccacacaaaccgtctttatgtacacctggcttagcatggcgtctatcatcgcccttccggcgttcatctttgccagagtgccgaacgatacgcatcaaaatgtggctatttcacggcgaaaaaggagcgcgcaatgaagttctggcgacccggtattaccggcaaactgtttctggcgattttcgccacctgcattgtcttattgatcacgatgcactgggcggtacgtatcagttttgagcgcggctttatcgattacatcaagcatggtaatgaacaacggctgcaaatgctcggcgatgcgcttggtgagcagtacgcccagcacgggaactggcgcttcctgcgtaataacgatcgctttgtatttcagatcctacgttcactggagcatgataacaacgaagataagcccggccccggtatgccaccacacggctggcgcacgcaattttgggtggttgatcaaaataataaagtgctggttggcccgcgagcaccggttccacccgacggcacacggcggcccattatggtcaatggtgcggaagttggcgcggtgatcgcctcccctgttgaacgactgacccgtaatactgatatcaattttgacagacaacagcggcaaaccagttggctgattgtggctttatctaccttattagcggcgctggcgacattcccactggcgcgcggtttgctggctccggtaaaacgactggtggatggcacgcacaaactggcagcgggtgatttcactactcgcgtagcccccaccagcgaagatgagttgggcagactggcagaggatttcaatcaactcgccagcacactggagaaaaaccagcagatgcgccgcgattttatggccgatatttctcatgaactgcgcacgcctttagcagtactgcgcggcgaactggaagccattcaggatggtgtgcgtaaattcacgccggagacgctggcttctttacaggcagaagtcggtacgctgacaaaactggttgacgatctccatcaattgtcgatgtctgatgaaggcgctctcgcctatcaaaaagcaccggtagatttgatcccactgctggaagtggcgggaggcgcatttcgcgaacgattcgccagccgtggcctgaaattgcaattttccctgccagacagtattaccgtatttggcgatcgcgatcgtttaatgcagttgttcaataacttactagaaaacagcctgcgctacactgacagcggcggcagcctgaaaatctctgccgaacagcacgacaaaacggtgcgcctgacctttgccgacagtgcgccgggtgtcagtgacgatcagctacaaaaattgtttgaacgtttttatcgcaccgaaggttcccgcaaccgcgccagcggtggttccgggctggggctggcgatttgcctgaacattgttgaagcacataacggccgcattattgccgcccattcgccttttggcgggcttagcattacagtagagttaccgctggaacgggatttacagagagaagtatgaccgagttaccaatcgacgaaaacacaccgcgtattttgatcgtggaagatgaaccgaagctggggcagttgctcattgattatctgcgtgctgcgagctatgcgccaacgttgattagccacggcgatcaggtactgccatatgtgcgccagacaccaccggatctgatactgttggatctgatgctccctggcaccgatggcctgacgctgtgtcgggagattcgtcgtttttctgacattccgatcgtgatggtgacagcaaaaatcgaagagatcgaccgcctgctcggactggagattggcgcagatgattatatctgcaagccgtacagcccacgggaagtggtagcgcgcgtcaaaaccattttgcgccgttgcaaaccgcagcgcgagttgcagcaacaggatgctgaaagcccgttgattatcgacgaaggtcgttttcaggcttcctggcgcggtaaaatgcttgacctgacgcctgcagaatttcgtctgctgaaaacgctctctcatgaaccaggaaaagtgttctcccgcgagcagttgctgaaccatctttatgacgactaccgcgtggtaaccgaccgtaccatcgacagccacattaaaaacctgcgccgcaagctggaatctctcgacgccgaacagtcatttatccgcgccgtttacggcgtcggttaccgctgggaagccgacgcctgccgcatcgtttaacatttttacctgccggagatggccttcagaccagatccggcaacattatcccacgcatggtcagcaaactgacattatctctccgccctggcaggcaccagaaaatcgctcatactttaattggcaaacagtacctttagatgctgttttcgatacgcaatttcaatcaaggagtcattatggctggttggtttgaactcagtaagagcagtgataatcagttccggtttgtgctaaaagcgggcaatggtgagactatcctcaccagcgagctgtatacctcaaaagcctctgcggaaaagggcatcgcgtcggtgcgtagcaacagcccgcaagaagaacgctatgagaaaaaaacggcaagcaatggcaaattctatttcaatctgaaagccgccaatcatcaaattatcggctccagccagatgtatgccaccgcgcaatctcgtgaaaccggaattgcctccgttaaagtaaatggcacaagccagacggtgaaagacaatacgtaattacgatgccgggcgtaggttgttggcgtccggctttatatcaaaataacgcttatttattgataattaagattaacctccgtcattaaaataatgagtaaataagtttcagtatcagaatttatcacgccccacaatcaccaatctgatccaccaccgtcagataccagtcactgtcataactgtaaagttgacttaaataaaataccagtccatcgttactctcttctggcgcagcgaccacacgcacggccccgtattccattcgacgcgctgcggcaatctgcgcatcagaaatagtattttgcggtgaaccaaacatctgcgtgaagaccaaactacggctgactttatggtgaacatcgctattgctaataaaatacccctgcttattccagccacgttcgcagttaaatttcgggatagctttcttattaaattcgtcatctcgcggaacatgttcccctgccgagggccatgggaaatactcgggaacaggttgcctgaaattaatttgcttaagattttcaacatccatcgaagcaccacggtggaaaagaacatacaaacccgtttttttatcaattaacgagttgattaattgggcatcttcttgctgaaagcccataatcacctttctggctgtttcctccagcgtacacccggcattggcgggtaaagaaaagaatatcagccccaccagcatcattcctttttttaacatcagcattgtttgcatcttctcatcatggggctcatattacaaatttaacaattttcaggataaaccttacaccatactgttaacctggccgggtaattcgctagctggaatacgaaaggtataccaggcataacgacagcgtttccacaggctggagaaatggagatgataaaggcaatctgcaataatttcgttatctggatataaagactcggcaaaatgtgtccagcgcgcactgagtttcatgttaaacagtttttcatcttctttgttaccatacaggcgcgacaaagtaatcattgcttcgagcgtacctttattcgcttcttcttgtacctgttggaggtgcaaatgagcaagtgagagttctttcacctcaaagatattaagtaaaaaaagcccccatgctttttcatgtccagcttcatgagccagaaataaattgtcaaggagatttttttcataaatagcccgtgtttctttagaaatttcttgtttatttagtgcctggtagcagatagcaatgctaaaataaatattttgtagatcttgttgatgttcgctataaccataattttttaccagtggataagataccgagctatggaaatttaggtcatcttgaagtattttaagtgcccgtcgaaaatactccaaagctgtagatggttcataaggtaattttgtattgtcttccttatccaaatattcaagagcaactaaatttaatgcggcaggaatatttctttgcttaccaattgtcgcaagcggaatgaaataatcagaaaggtcaaaccaactcaaatcttttattgccgaccgccaattatgattgtatttaatgtcactagctttttccagccaagcatcgccctgcccttcatctttttcaaaacccaaaataccctctcgctggaaaaaccccctataaataacaggtgtagcataagttgtattctgtgaattttggcagataaaattatatatccagaatgaatctggataataacttaatgcaaattttatcgcgtacgcagtgtaataattattgagcttcatgtcttccatcaccgctcgctgtatacagcaccacaacttatcgtgatcgttctgcttgttatagcaggcaagtaaccactctagggcattatggcgacattcctgaaattgtgcgtactgagcaatattctctgctaagtcgattgcatattgttgctcctcgggcgcaatgtcctcaatgctgacatctcggtaatcatcccaccaaagtaagagatccatatagtcatgttcttcggtagataagtgcttacaggttactgaatccagcaattcggaaatttctttatgcgaccctccccagcgtggcattcgaaatggtatatattcaacaaaaggataaaaagtgtgaggaaaaatagtcaggcaaacagaaagccaatatttttgcccaccatcatcatcatactcaggaagtatattggggcgaggcaaaacggggcatattgcatgctcaaacgaaagtccggaatacgccatcaacgcttccacttcttgcggggagcggcggtgataatttttcagtgcgatcattaatggtattcctgcgacactatcaccgttaaggtgtgccgccagccaggctggctgaccaaatacttttgagttggtgctggtaagtaatgcagccatccattgtcgtgggtcacaatcaattgctttaagtgtagcgatgaccatttgttcattacatgcaccagcacaaagccacattgcatgtgtggtatcatttgcccagccataactgcgatataaccatgcacggtgattccagtattgtgcttcggcaagccaggcatgtgtagaatgaggtcttgcttgctgccaggttttaatgagtcttaaaccttctgttccggcatcaactagcgtgttcatatcataaaaatagttgcacatttgggtccaggataaaaaatagcgcttttcagcctgacgagaagtgaaactctcctgtaatacctggttataaatttcatctagttcctgataacgtttttcttgtaacatataaggaatatttgcgatttgccattttctctcaagagtattaagtggcattttttggtcacacatcttttgcattgcactgagtaaacgagcatcctgttccatagatatccttttaattaggttcaaaaattttaaattcattccacggcaattttttccagttactggatggatctttcaaccatgcagtgacttcctttaaatcacggttcgcagtggcgacgggggtatcgtatatcattaaccatttttgtcgggcgcgaacataagcactggcataatcttcccatgaagcgaaacaatcttgtgctctttgagcattcagtaataacactatccaggcctggttttcatcgcaccagcctaaaccggcgatgcaacgagttaaaaaagcagtgcgcatacagtcaaacgccagcccatccagaacctggccttgtgctgccagttgttcgtaaaaatcatgtggagaattaccaagccctgtagcccagcgctgtaatataacgccaatttgttgacggaaatcttcgttgctttggtaagtttctgttcctagctcttgtttaacctgtagtgcaagttgttgacgcttatcatcagtcaactttaaatctaacgtgaagccatttactgacagtccattacgacgagcaactatatcaccaattgctaatgcccacttacgtctctttgttgctcgtcttttgtccttgattagatccttttctttttctttagcaataaaagcatcgatttgtggtttgttttttttgtatctatagataaaaataaatattgcgaccaggagaacaatgataagactcattatttttcaacctctgacaggggtaagtaatgagatgtctgtaatgtcaaactctctatctcaaaggaaatgttgctgatattttgacctgcaaattgcggatgccactcagcgccagggaataacatttccgcagaagtagcaactatagggtcaatagcattaagataatgtaacttatcaggtgcgctgtgtaacagtaaccactgcaactccactgaaggatttgtaaaatgttctaataaatgaaagttattatgtagtacgcttagtaaaaaactggtttcgtatacttccgttacatatttccacccctgatattcaggtgtattttcataaacaatacccataccttcacaatcactatgtcgaactgcttgtggtgataatagttgcaaaagagacaaaacatcgtccgcatattttttaactggatgacgattttgcttaccttttatttgatcaatttcaagtgaatcaccaacaacattgagagcaatagtaacatgaggaatattattattatcacgcaaactgaataaccgtaatttatgttgctcaatttgatttgcataatactcaccataaccaccggtaagattttttcgatcatcaaactggcctacgcaatgttgcatatgccatgattcataagccatttcacgacgaaagttcgaatgactggcatcaaactcaacaatttttccgtctggcacatcaagtattgactttacagtattttgttcactcggctgccaccctttctcgcgtcgttgaagcatcttttcatgctcttcttcacgcattctgaacgcaacgtagcaggttatgcgctgtagttttgattccagacgggtaccacatttcctggaaagaaattccaccaactcccgttctttggttaatatttgttgatgatcggtttcgatataataaagtgtcgcagttgatactgaggcagtattaaacttcgataccagccattccgggattacatcatcatttttattaaacagtgaatattctgcaagcgagttaatttgttgcaccattggaaagtcactaattagccatcgataaaaatggttgagtaaccatttttggatggtctcattatcctggcgaaacagacttctttgcaaaattgctgtttttacttccggggcattaattacatcccttgcattataattctggtgaatatttccagtcataacatccgcccgtgtttattatatcactcaaagcaataattgttgactatagattttttatctaaatcagcatggttgcaggtacatactcaagtaagccactcaagaaaataacgaaaactcaatagtggcagcgtcacaaactttggaaattatgtcttatatttgcagtttattttagtgaataattgagataaatgacattattttacatcctcaataattcaggctgtaagaggacggcaaatacattcataattatcaggggatgaacattcaggaaagtggtcagtatcgtcaactttttcttttatcactacatgaagatttcgtgtagatactcccatctctgccacttctcccctcacatttacactggagctaaacccgccgattgcgctacaatgcccgcccttaaagtgggggcactcccctaaccgcttcatcaggtgaagcggctctgacctgtcatcagaacgagagaattatgtttaaaccggaactcctttccccggcgggaacgctgaaaaatatgcgttacgctttcgcttatggcgcagatgctgtttatgcgggccagccgcgttactccctgcgtgtacgcaacaacgaattcaaccacgaaaatcttcagctcggcatcaatgaagcccacgcgctggggaaaaagttttatgtcgtggtcaacattgcaccgcacaacgccaagctgaaaacctttatccgtgacctgaaaccggtggtggaaatggggccggatgcgctgattatgtccgatccagggctgattatgctggtgcgtgagcacttcccggaaatgccaatccacctctcggtacaggctaacgccgtaaactgggcgacggtgaaattctggcagcaaatgggtctgacccgcgtgatcctctctcgcgaactgtcactggaagagattgaagagatccgcaatcaggtgccggatatggagatcgaaatcttcgttcacggcgcgctgtgcatggcctactccggtcgctgcctgctctctggctatatcaacaagcgcgacccgaaccagggcacctgcaccaacgcctgccgctgggagtataacgtccaggaagggaaagaagatgacgtcggcaacatcgtacacaagtacgagccgattccggtgcaaaatgttgagccgacgctgggtatcggcgcgccaaccgacaaagtgtttatgatcgaagaagcccagcgtccgggcgagtatatgaccgcgtttgaagatgagcacggcacttacatcatgaactcgaaagatctgcgcgccatcgcccatgttgaacgcctgaccaaaatgggcgtgcattcgctgaaaatcgaaggccgtaccaaatctttctactattgcgcacgcaccgcgcaggtttaccgtaaagctatcgatgacgccgctgcgggcaaaccgttcgataccagcctgctggaaacgctggaaggtctggcgcatcgtggctataccgaaggtttcctgcgtcgtcatacccacgacgattatcagaactacgaatacggttattcggtttctgaccgccagcagtttgttggtgagtttaccggtgagcgcaagggggacctcgcggcggtagcggtgaaaaataaattctccgttggcgacagccttgagctgatgacgccgcaaggcaacattaactttacccttgagcatatggaaaacgccaaaggtgaagctatgccggtcgcaccaggcgatggttatactgtgtggctcccggtgccgcaggatcttgagctaaattacgcgctgctgatgcgtaatttctccggggaaaccacgcgtaacccccacggtaagtgattaatttcgattatttttcccagatggaaaattcttagaaaccgatcacatacagctgcatttattaaggttatcatccgtttcgctgaaaaacataacccataaaatgctagctgtaccaggaaccacctccttagcctgtgtaatctcccttacacgggcttattttttatgcataagccctatccctggtcaccgtcttccattgaccacatcgatagaatcctccttcatagcacgatgcttttcacttatcgacatcgtgctcgcacaggttccggttacgcacagccagaacgcgcatgtttgacgcttaccaaaaaatgaacctaaagcattggaatatttttgacatcattttctgatggctgcataaaataaaaattctgctttagtttcatctatctgtttgtcattattactcacattcaataatggtgttgaagaatatcccatcacagataaaataaatatgtgcatggtagtcttgaatctattctcactctccacatttgaatgtcagacgagcgacgccatgtaatcctgcaccttctgtcttcaggtcaactatctgcatttttttgccctgagtaacacagaaatgagttgcatcattttttactatattttctgcaccagatattctacccctggctaaagaagcttcggcttcggtgtagtattggttatcgagtttacgctgaatattacttttatatgcaaggccaaatttaccgatacttgtctcatcattatgcacagcacaaccagacataagaaaaacactaattaatgatatagcagctatctttttcaccttaccttctcccattaattaccaacgacattctctagtgtttaaatataataatggcatgattattatatttgaataggattataataaatgttttgtacaacatttcctacataagtaggaattacagacatggagacccttccgggtaaccccatgggagactttaatatattttgaatagtatattgaagatgccactgtttagttgaatattagatatattctcttttttaaaatttatcagtggctaccattaatattcgctgtccccattgtaagctcctggtggtaagcactgaatccccatacctgaactgactttttatcctccgactttcatcctgttctgactccaccttttcttttctgctctacactatctacagaccaatcataaaggcacatacgatcatggcagaatttcccgccagcttactgattcttaatggcaaaagtactgacaatctacccttgcgcgaagcaatcatgctgttgcgtgaggaaggaatgacgatccatgtgcgggttacctgggagaaaggtgatgccgtacgatttgtagaggaggcccgaaagttaggtgtcgcgacagtgattgccggtggtggcgatggcaccattaatgaagtttctacggcattgattcaatgtgagggggatgacatacccgcgctgggaattttgccattaggaaccgccaatgattttgccaccagtgtagggattcctgaggcactggataaggcgctgaaactggcaattgccggtaacaccattgcgatagatatggcgcaggtcaacaaacaaacctgttttattaatatggcgacaggcggatttgggacgcgtattaccacagaaacgccggaaaaattaaaagccgcgctgggtggcgtctcttacatcattcatggcttaatgcgcatggatactctgcaaccggaccgttgtgagatccgcggtgaaaactttcactggcaaggtgacgccctggtcattggtattggtaacgggcgtcaggccggtggcggtcaacaattgtgcccgaacgcattaattaacgatggcttgctgcaactgcgcatttttaccggcgatgaaattattccgactctcgtatcaaccttaaaatctgacgaagataacccgaatattatcgaaggtgcttcgtcgtggtttgatatacaagccccacacgaaatcacttttaatcttgatggcgaaccgttgagtgggcaaaacttccatattgaaatacttccggcggcgttgcgttgccgattaccaccagattgtccattgttgcgttaatcaaactattctctgttgaaccagagagaatccgtaatgccggatgcggtgtaaacacctcatccggcatacagaacaatactacaccgtaattaattttacccgtgtcttctgcaatgccagtttatccacctcagacacagcatcatcggtaataataatgtcaattttttcgattggcagtacctgattaaaaccgcgacggttaaatttcgatgaatcgagaacggcaatcactttattagcagcggtgaccatcgcaccgctaacagaataaccttcattaaaggtcgtaataccattaaccgcatcaataccatcagcacccacaaacattaaatcggcattaatatcctgcagagaacgttcagcaatagatccatgcatagatcgcgttttatggcggaccgtgccaccgcagacgaccagagtaatgtctttattttcggaaagggcaaacgcagccgggagactgttggtaatcaccgtgatatttttggcggtcattaatccttcggcgataagcattgtcgtacttccgctgtcgagaataacggtcatcccttcgtggatcattttgactgccgcctgcgctattctgtttttcggcgcgctggcgagctgaaatcgctctttaaacccgacttcctgggtctcggtttcgctattaccggacattattttcgccgcaccgccatgaaagcgcgtaaccacgcctttttgttcgagaaagcgcaaatcggcacggattgtcgcttccgaggcagcaaatactcccgccagatcctgaacaagcacggttccctgttcattcactaattggatgatcttattccttcgctcgaatgaattcatcgtcatttacccatattcaattgtggctagtgtaaacgaagggggaccattggtgaatgatctgttttgcacaataccgggcctgcatcacgctggcccgcggtttcagggaatgagcaacactttgcccggcatggcattacgagcgatgtcacgcaccgcctgggcgaagctttcaaagcttccacggtgagcgattaatggctccaggcttaacttacgttctgtcagcaaccggctcgccgtttcccactcctgccccggccaagggctggagtagttcatccaactgccgataaccgtcagctctttacgcaatattttgccaaacgttgcagatgttaaatgcagatcctgatgcaacgtgcctaccagcgccagttgggcatgaggaccggcaatctctaccgccagttcgacggtttgcgggacgccagccgtctcgaggataagctgattaaagcgcagatcgcgtaaaacgccctgtatttgcggcgcgctcatttcacggctgttaaatgtttgcatcgcaccgaaagattttgccagtgccagtttttctgagctaatgtcgatagccgtcacactctttgctcccagcgcgacagcgcactgaattgccagcaggccaatggttccggcaccaataataataacgtttttattctcacatccttgcgctaaatggaacgcatgcaggccaacggtaatcggttcaataaaagcgccatcctcaataggcatatccgcaggtagtgcaaagacattgtttcgcttaacgacaatatattcggcaaatccaccatcacgccgtgagccaataaaatcatattttgcgcactgggaataaaaccctttcagacactctggacaagtaaaacagggtaataacggcacacaggcaaccgcatcgccggggtgtaaatcatcaacaccggatcccaccgcatcaatatagccgctaaattcatggcccaacgttattggataataatgtgcaccatttttaaatatcctgggtaaatcggaaccacataagcccgagctggcaatttttacccgcacctcatcctgatgtttaatttcaggaatgacgctttctgctacgcgcacgataccatcagtatcattcaccactgatttcataaaaactcctgattgttaagggggataacctccccctcaggtaaaaattattctgcgagaacggctttctcttgtttaataaagccacgcgctctacgccaggtcatgaaaataccggtaagataaattgcgccgataacaatgaaaccgggaatattttgcggggagaaaacctgaatcagtaaccaggtaatgggagaaccgccctgatccattgaagccaccatacccccggcttttaacgcgcccgcattagccgccagttgggtgtgcaaaccaatagtttgcgtcgcgatccacagggtgatgctcataatgatgacacccgaaattaaggtgcggaacagatttccacgatgcaccgcgaccgccatcgccacaaagaagccgatggtggcaaggtcgccaaacggcagcacctgattacccggcacacaaacagcaattaaaatggtgagtggaataaaaatcaggcttgccgataccaccgccgtatgtcccagcagcaacgccggatcaaggccaatcaggaactcctgaccgccgaacttcgcctgtaaacgactacgggcctgcttagcgatgggcgttaaaccatccatgatgggtttaatcacccgtggcatcagcagcataactgccgccgtttttaccgccagctgcaatacacctttgacatcgtaacccgcgaggatgccgataatcagtcccatcacaaaacccacggtgacgggctcgccaaaaggaccaaatttgcgctggatatcgtcggcactaaatttaatacggttaacccctgggattttctcgatgatagcatccaccagcaccgctatcggccccagatacgccgatgtaccgtgcggaatagcaatgccttccagctcaaagaaatttcgggtatcgcgggcaaaccagtcgccgagtttataaacaaacgccgcgtgaataaccacacccgccatccctatcatccatgaaccggttgccagatgcagcaacgcgccggtgaaggtcatatgccagatattccagatatcaacatttaccacccgcgtcatacgggtcagtaacatcgccacgttaaccagaatcgcaatcggaatcgccaccagcgcaatttgcgacgcccaggtcatgggtgaagagcccggccagccgacatcgaccacatgcagattcaggtcgaaattttccgccatcgctttcgccgccggaccaatggaatccagcattaagccaatcacaaggccaatgccaacaaagccaatcccgatatgcagacccgctttaaagcaatcgcctgccttcatgcctaatattttagaaaaaataatgatgacaatcggcagcatcaccgtagggccgaggtcgagaatataacgcatgacttctgaaaacataggtcacccctgtaagatagtcagaattttattttgtaatgcttcgataccgacaccagaaacaaaaggcatgccgtgaactaacggaatatcgccaaaactacgatccaccctggcagtggtgcatatcaaatgcacgccatccatataggtttctatttcattaacccgacactggattaattcaacaggaatattatgactctgacacaactctttaatttcttccgccgccatcgtagaggtcgcaaccgcgcctccgcaagcgacaataattttgcgtttcataaatagtcctttttattgttacagagggatttattcgtctgaatctaaaacatactttgtgaagtattcctttaactgggtttcaggaagagtgattagtgtctcgacgatatcaggctgttgtaacttgccaaataaacagcgtaaaagtttcaattgctgctgcggattttccacaatcaacgcaataaccaacgataccgccacgtcgttatcatcatccgcttgctgaaaatgaactttatttgttggccttaacagataaatggctgacgacttagcatgaatcgcctcacaatgcggtattgcaatggcgtgctgctcaagcattatcccggtagggaattctgcttctctggcaattaatgcctgtggccaggtatcatgaaccacacctttcgcgagcatctcattaccgatatgggttaaaacttcgctacgatcgacaaaagaaattccgctacgaacaaacaggttagtcatataccgtccttattccgcacagccgtagcgataggcgcgcaaaacatcataaattttatccataataagctgatgcggtattgctgataattccccggactgaatgcgttcaaattgtttcggaagatactgactaatcatgcccagtgggatgtccacgccttccagattcaccatcatcgtttcgacgctatttttaatccggctatgcggccagtaataacgaatacgatccgacaggctgtaacgaatatccagcaatgaatcgttaaaacccgtgcgataatattttttccagtattgcggttcgtcgagcatcacttcttcaatcaccgccagacaacggctacgattttctggagcgatgagttcctgctcaatttgtgccagcgcaaatatcgcctcgcgtaacgcaaaggttaatgccggaccgactttcaaaattgcaaaatgatcgcgaactaattcccgataggccgtctgagtctggtaatcggtggaatgcgcttcataaaccattttggttttttctatccattgcgccaacgcctgagcttcttgcgcctgataatgaataatattgctatggtcaaattccacacccggctgcaccacgatggcaatcacgcgtgttaacgcctctgccagaccacgggcaataaaggccttttgatgcgtgcgtaaagtattggcggcatcttcaacctgggtgatgtgtactgactgaatggcgctggcctcaccgcccggaaccggaacttcggtgccaatgacatagttcagttgctcacgctggcaatcagtcgccacactttccgccgccagacaaagcacagcggcacgttcagcaaccgtttctggcgctaacggtatggaatcgtcagcgcaggacattgacgcatcaagatgaattttactgaagccggcacgaacatatgcctttaccagctcgacggatttttccatcgccgcatccgcattttcttgctgccagcagtttggtcccagatggtcgccgccgagaataatacgctcacgagcaaatccgactttatcggcaatcgcaaaaacaaattcgcgaaagtctgccggtgtcattccggtataaccgccaaattgattgacctggtttgacgttgcttcaatcagcactttacgcgtgctgttgcgatcaaatgccagcgccgcttcgataaccaacggatgtgcagaacagactgaacatatgccaatatgttcaccagctttatgccgggcaattaacgttttcatgttttttccttgttaaatggcaggtgcgttatgccctgccctcgcagccacaatcggcaatcactttgctcaccacatcgcgcattgcagatttagccgactgcaaataatcacggggatcggtcgcttcggggtgctcggtcaggtaattttttaacgcctgcgagaaggcattttttagctctgttgcaacgttgattttgcatatccccagtttgatggtttgctgaatatccttagtcgataatcctgacgcgccatgcagcaccagcggtaaattcacccactggcgaatgttctccagtcgagaaaaatcaagcgccggtgctctggcatacataccgtgagccgtgccgatggcgaccgccagggaatcaatcccggttgcctcggcaaattcacgcgcctgaacggggttggtataaaaagcatcggcttcattgacttgcacatcatcttcctggccgccaagttgccccagctccgcttcgacgctgacatcaaagcgatggcaaaaatccaccacctctttgacccgtgaaatattttgcgcaaaaggcaaatgcgaggcgtcaatcatgactgagcgcacgccagaacgaaccttctgagcgatatcgtcaaatttcgtgtgatggtcgagatgaatcaccagtggatggtgatattgcttcgccatcgcgctgaccagcgccatcagattttctgtaccggcatgagtaaatgtgccgggcgttccggcgatgatgaccggcgcatgcatgctggcagcggtttccaccaccacttgcatcgtttcgagattgtgaatattgaatgccggaaccgcataaccgccgcgctgtgcgttgttcagcatctgctttgtcgataccacgtacattttcatatcctgtcgtttgttttcgatttcaaaacataatgaaattatttgttttcaaatgtcgagataacgatcacaaaaacgacaatgtgaaaattaatcagaatgacaggcaaaaaaaacggcctcccgggggaagccgtaacaaagtacgcgtggttttatgccggatgtggcgttaacgccttttccgtcctacggggtggtgctgttcgtatgaggcgcatcaggcgatagtaattttgctatcgagataaacgtcctgcacggcgttaatcagtttcacgccgtcagccatcgatttcttgaacgccttacgtccaagaatcagccccattccgcctgcgcgtttgttgataaccgcagtacgcactgcatcgctgaggtcagtttcaccgcctgcagcaccgccggagtttatcaacccggcccggcccatatagcagttagctaactgataacgcaccaggtcaatcgggttttcactggtcagtttgctgtagactcgatcgtcggtataaccgtaattaatcgctttatagccgccgttattttccgccattttttgtttgacgatatctgcacctatggttgccgccagatggttcgcctgaccagtcaggtcggcggaaacatggtaatcaacgccatctttcttaaaggcggagttacgcaaataggcccacagcactgtcaccatgcccagctcgtgcgcacgttcaaaagccgcagaaatttcttcaatctggcgacgtgactcttccgagccaaaatagatagtcgcaccaaccgccaccgcgcccatattgaacgcctgctccacgctggcatacagcgtttgatcgtaggtattcgggtaacttagcgtctcgttgtgattaagtttgacgaggaatggaatgcgatgcgcgtaacgccgcgataccgatgccagcacgccgtaagttgacgccacacagttacagcccgcttcgatcgccagttcaacaatgtttttcgggtcaaagtagagcgggttagcggcaaatgaagctccggcagagtgctcaacgccctggtcaaccggcagaatagaaagatatcctgtgccagccagacgcccggtgttgtacaacgtctgcatattacgtaacaccgctggcgggcgattattgtcaatcatcacgcggtctacgtagtcatgtccggggagataaagctggtcagaaggaatagtcatacaacggtgctgtaaaaggttgtcggcgtctttgccaagcaactgcgcaatatctgtcattactatgctcccgtaaattccgattggatatcggctatggattgtcctggcccgccttttgcgggcaatcataatcctggtcgttacgggcgagtttttccatcttttggatgttttttcagcgttttctgttggctcgattcatcagaaaaaatgttaccgcggtcaagttttcaccgcaaaggtatttaaaaggtattactaagtggtattgtcatcgcgtaccttacattacctgtcatgaaggaattaaaagatgaaaacaacagcaaagctgtcgttcatgatgtttgttgaatggtttatctggggcgcgtggtttgtgccattgtggttgtggttaagtaaaagcggttttagtgccggagaaattggctggtcgtatgcctgtaccgccattgcggcgatcctgtcgccgattctggttggctccatcactgaccgctttttctcggcgcaaaaagtgctggcggtattgatgttcgctggtgcggtgctgatgtatttcgctgcgcaacagaccacttttgccgggttcttcccgttactgctggcctactcactaacctatatgccgaccattgcgctgactaacagtatcgcttttgccaacgtgccggatgtggagcgtgatttcccgcgcattcgtgtgatgggcactatcggctggattgcctctggtctggcatgtggtttcttgccgcaaatgctggggtatgccgatatctcaccgacgaacatcccgctgctgattaccgccggaagttctgctctgcttggtgtgtttgcgtttttcctgccagacacgccacccaaaagcaccggcaaaatggatattaaagtcatgctcggcctggatgcgctgatcctgctgcgcgataaggacttcctcgtctttttcttctgttcattcctgtttgcgatgccactggcgttctattacatctttgccaacggttatctgaccgaagttggcatgaaaaacgccactggctggatgacgctcggccagttctctgaaatcttctttatgctggcattgccgtttttcactaaacgctttggtatcaaaaaggtattgttgcttggtctggtcaccgctgcgatccgctatggcttctttatttacggtagtgcggatgaatatttcacctacgcgttactgttcctcggtattttgctgcacggcgtaagttacgatttttactacgttaccgcttacatctatgtcgataaaaaagctcccgtgcatatgcgtaccgccgcgcaggggctgatcacgctctgctgccagggcttcggcagtttgctcggctatcgtcttggcggtgtgatgatggaaaagatgttcgcttatcaggaaccggtaaacggactgactttcaactgggccgggatgtggactttcggcgcggtgatgattgccattatcgccgtgctgttcatgatttttttccgcgaatccgacaacgaaattacggctatcaaggtcgatgatcgcgatattgcgttgacacaaggggaagttaaatgaaaacagaacgtattctcggtgctctttatgggcaggcgttaggggatgcgatggggatgccctccgagctttggccgcgcagtcgcgtcaaagcacactttggctggattgaccgttttctgcctgggccaaaggagaataacgcagcctgttattttaaccgcgccgaattcaccgacgatacctcgatggcgctgtgtctggcggatgcgttactggaacgtgaaggcaagatcgatccggatctgattgggcgtaatattctcgactgggcgctgcgtttcgacgcctttaacaaaaacgtactaggtccgacctcgaagattgcacttaacgccattcgcgacggtaaacccgttgctgaactggaaaataacggcgtgaccaacggcgcagcgatgcgcgtctcgccattaggttgtttgcttccggcgcgcgatattgactcttttattgatgatgtggcgctggcctccagcccgacccataaatccgatctggcggttgcgggggcggtagtcatcgcatgggcgatttctcgtgccattgacggagaaagctggtcagcgattgttgattcactgccttcaattgcgcgacatgctcaacaaaaacgcatcactaccttcagcgcctcactggcagcacgtctggagattgcgctgaaaattgtgcgcaatgctgacggcaccgaatccgccagcgaacagctttaccaggtcgttggcgcaggtaccagtactattgagtccgttccgtgcgccattgcgctggttgaactggcacaaaccgacccgaaccgttgcgccgtcctgtgcgctaaccttggcggcgacacagacaccatcggtgctatggcgacggcaatttgcggcgcgttgcatggcgttaacgctatcgatcctgcgttaaaggcggaactggatgcagtaaatcagcttgatttcaaccgctatgccacggcgctggcgaagtatcgccaacaacgggaggcgatatgagcggcgctcgattacacacgctgctgcctgaattagccacgcgtcagccggtgatggtcgtcggcgcggcggtcattgatgtgatcgccgacgcttatgccctcccctggcgtgggtgcgatatcgaactgaaacagcagagcgttaacgttggcggctgcgccctgaatattgccgtggcattaaagcgcctcggcatcgaagcgggtaatgccttgccgctcggtcagggggtgtgggcggagattattcgcaaccgcatggcaaaagaggacttaatcagcctgatcgataacgccgaaggtgataacggctggtgtctggcgctggttgagccggatggcgaacgcacttttatgtcattcagcggtgtggaaaatcaatggaatcgccagtggctggcgcgattaaccgttgcgcctggcagcctgctctatttttccggttatcaactggcctcgccctgcggcgaattgttagtggaatggctggaaaagctacaagacgtgacgccgtttatcgattttggcccacgtattggcgatatcccggatgcattactggcgcggatcatggcctgtcgacctttagtgtcactcaatcgtcaagaggctgagattgccgccgaacgttttgctttatccgcagagataacaacacttggcaagcaatggcaggagaaatttgccgcgccgttgatcgttcgcctcgataaagaaggcgtatggtatttcagcaacgacgcttctggctgcattccggcatttccaacgcaagttgtagacaccattggggcgggcgacagtcatgccggcggcgtacttgccgggctggcctctggtctgccactggcggatgccgtattactgggcaatgcagtggcgtcgtgggttgtcgggcatcggggcggtgattgtgcgccaacgcgcgaggaactactcctcgcacacaaaaacgtatagatcgctgcgacagtggctgatgctgtactcaataggccgttgctgttggtcaagcgccacttgcttgatcaccagcaccggtattttgctatctaactgaatatgtgactgaaactcggcatccggcatccgggcgctaacgcgggaacgcgtacgttgtgggtaaatgtgctggctgcggaagtagtcataaagagaaatcccgatggcatcaacatcatgaattaaatgtgccggaacccacgattcctcaatcgataccgcctcttcatcgacatagcgaatacgcttaagcaaaaagacatcacttcccgcttcgaccgccagctgctgcgcgacttcttcgggacatttcacgacacgcttgttaacccataacgtatcgggctttttcccgcgcaataccacctgctgagaaaacccccgcgcttctttcagcgagtattcgaagatgttgttgatctgcgtgccgtaaccacgcgaacgcgtcaccacgccctcttcttccagcgcctgcatcgccttgcgcaccgtaatgcgcgaaacgccggttaactgacttaaatcacgctcaccgggcaaaatattgccatgctccagcaccccgctgcgcacggcattttttaccgtttcggcaaacttaatataaagcggcgtgttatccgccgctaaaatacgctcgttcagttgggcaatcagctgggtatgcgcttgttccatttgtctttttcctgccggggaatctggtgggagtatatcactgcttcatatttaaggcgtttctttaatcccatcaacgaatccctgcaactcctccaccgtgccattaaacacattaaaatccaccggaccattaatgccatcgacctgtccacggtcggaatgctgccagaagcgccaggccatgccgtcattgtccggacgacgttgatagtagtgagccacccaccacggatattcattgaaatagcccgccagattcgtgtgataaaaaacggctcctgagtaaataattggcttttttcccgtacgtttttcgaccatttttagccactgacttacccgcttgcgtaattcttttgccgataattttccccgttcttctacgtccagtaccgcagggaaatcgccttgtgagaaatccaccgtttgcagaaataatcgcgcctgaactgaagcggatactgacggggagaaataatgatacgccccgcgcagcaggccattttcgcggcttagttgccagttacgcgaaaaataggggtccaccagcttttcgccttccgtcgccttaataaaggcaaattgtaagcgaataccgttatcgcgcatttttgccacccgctgccagtcgatccgctcctgccagcgcgaaacatctattccgtgaatggtgtaactggcaggaatgcgaatagcgaaagatttaaccgggcgataaccgtagaagtgaatgtagtctttaatctgaattgctgtcgaatagaaaaaattcaccgtctgacgcggataaattgcaacgatggaaattagcccaagagcgcataataaaacggtgaatttttttcgactggtgattctcaactgcattggtttcatccctgaatgtcagcaccaaaggctgacaataaccaaagcagctatagtacggtgctcaccaccaggcgtggaagtggtgaaccggaccaataccgtgaccaacttccagcgtgtcggcctgggctaatgccgatgaaagccagctttttgcctcctgtacggtgtcagtccagtttgtatggcgcgggcgcagtgcagccaacgccgcagagagcgtacaaccagtgccgtgagtgtttttggtcataatgcgctgtgcggtaaaccgttgttcaccctcgcgggtaaacagccagtccgggctttgctcatcatcaagatgaccacctttcattagcactgcgccacagcccatcgccaacagcgagcgcccttgttccagcatttcctgttcggtgcgcgcgtgtggcgcgtcgagcaaggcggctgcttcgggcaagtttggcgttattaatgaaacctgtggcaataatcgactgcacagcgtagcaaccgccgaaggtgaaagcagcgggtcgccgctttttgccagcataacggtgtcgagtaccacgttttggatctgataacgttgcaaccgttctgccaccgcttcaacaatatcggtttccgccaacataccgattttagtggtgtcgattcgcacatcgctgaacaccgaatcgagctgggcggcgacaaaatcaggctcaatgcgatacaccgactgtacgccacgggtattttgcgccactagtgcagtaataactgagcaaccataagcgccaagtgccgagaaggttttaagatcggcctgaatccccgcaccaccactcggatcagtaccggcaatcgtcagagcgttaattcgtttcatgcctgcacctcctgcgccaattgccagagcgcatcaaggaaatgtggaacaaaactgcctggcccctcgcttctggcaactgcgcgttctccggcttgtttcatccagtgacaggcagatgcgatattttccagcgtatcgcctggtagcgcacaacaggcagcgacaaccgccgatagtgcacagccagttcctaccactttggtcattaacggatcgccaccgtgaatgccaatgatacgatgtccatcggtaacataatccacctcgccagtgaccacgacgattgcgccagtttcccgtgccagtgtttgtgcagcgggtatcgcgttagctgcggcatcagtggtatccactccccgtccaccattagcaacgccagctaatgccatgatttccgaagcattaccacgtatggcggttggcttatgggacagaagttccacacaaaaacggcggcgataatcgagcgcaccaaccgcaaccggatcaagcgtccagggcgtttgtgatcgtgttgcttgctcaacggcagcactcatcgcttgcgctcgtggctgcgtcagcgtgccaacgttaatcaacaaggcactggcgatagccgcaaactgactggcctcttcggtttcgataaccatcgctggcgatgcgccgagcgccagcaaggtattggcagtaaaagtttgcaccacatcgttggtcatgcagtgcacaagaggggaatgttggtgaaaaaggtgtaacgcgtgcgcagattgcgctgaactcagcaggtcgacttgcatagtttgctcctgccataacgtgaagaagcaatgacctggtggtccgtgacttccctacgctggcattatccagatcaggtgatacgggtatttctcagccttcacaaagaagggcaccccgagtcgtttggttgcgataataaatcgcagaggaggatggtaatgtccagcgcacgcgttgtaaacggggaaaaacggcagttttacaatcgcgttaataaattatttgatataagaatccagcaccttcagaacgacatccagatcttcttctcgttttagctcatccccctggtgaacgatgtgttccgtcagatgacctttaatcacttcccgcatcagaccgtttaccgcgccacggatagcagcaatctgttgtaaaactgcagcgcattcatgcggttcgtcgagcattttcttgagcgccacgacctggccctgaatcttactggcacgcgctttcagtttctgtttatcacggattgtatgagacatggcaacacctggttaacaagaatatgaaaaatcatagcactattaatctactggggggtagtatcaggtactgggggggagtagaatcagattgccgaattaatactaagaattattatcatgaccgaatttacaacacttcttcagcaaggaaacgcctggttcttcatccccagcgccatcttacttggtgcgcttcatggcctggaaccggggcactcaaaaacgatgatggcggcgtttatcatcgccatcaaaggcaccattaaacaggcggtgatgctcggactggcagcaactatttcgcataccgcagtggtctggttaattgcctttggcgggatggtgatcagcaaacgctttactgctcaatcagcagaaccgtggctccagttgatttccgcagtgatcattattagcaccgcgttctggatgttctggcgtacctggcgcggcgaacgcaactggctggagaatatgcacgaacatgatcatgagcatcatcaccacgatcacgaagatcaccacgaccatggacatcatcaccatcacgaacatggcgagtatcaggatgcccatgcacgagcccatgccaatgacattaaacgacgctttgatggtagagaggtcaccaactggcaaattttgctatttggcttaaccggtggccttatcccctgcccggcagcaattaccgtgctgttgatttgcattcagttgaaagccctgacactgggcgcaacactggtcgtcagtttcagcctcggcctggcgttaacgcttgtcaccgtaggcgttggcgcagcaatcagcgttcagcaggtcgcaaaacgctggagcggatttaacactctcgctaaacgcgctccctatttttccagtctgttgattggcttagttggtgtgtatatgggcgtacatggcttcatgggcataatgcgataactcaatcctttaggcttgcatgttatcttcagcccaggatgattcttaaatcagctatttccgctgactctctgctcgctaaggatgcttttagggcatcctttcatttacactttttacgaaatcatgggatcactaacaaaatatcgcttgtcagttatattgtatggcaggaaagatatgcgactgatattacagatccccaaagtggagagtttatgaccattaaaaataagatgttgctgggtgcgcttttgctggttaccagtgccgcctgggccgcaccagccaccgcgggttcgaccaatacctcgggaatttctaagtatgagttaagcagtttcattgctgactttaagcatttcaaaccaggtgacaccgtcccagagatgtaccgcaccgatgagtacaacattaagcagtggcagttacgtaacctgcccgcgcctgatgccgggacgcactggacctatatgggtggcgcgtacgtgttgatcagcgacaccgacggtaaaatcattaaagcctacgacggtgagattttttatcatcgctaaaaaaaagccccctcggagagaggggggaatgcagacaccttaatatttttattattagccacttgctcgtcttgcttgttattagtcgtatttcacgttgattaatgcggttgcctccagtgcgccagatttaactttgtttgtatcgtagacgtagtaactggccgttatcggaattgaaaccgttgtatctgtaagttttgactttgccgcaatttcttttaaatttgtatatcctttactgctgttagtgatatttaaaagtgtgactggcgtaccattactttcaagaataaatcctacgccattatcttccgcacctttcaggatcgtgttgctgttggttaacaagtcagaacttgataaatacacctgcattttccgtgatgtttgattttgttgacctaataaatttttacaacgcagcataatatccccttttttactatttattgttgttttgttacctatggctggtaattgtgaaacgggaatactctctaacgtaattaataaatcgtccggtttgcaggttgtggttatcgggttgtatgacaatgtcagattaaaggaatagacacctgcattttgtgccaatgcatttctgtagctatttacacatgcatcccatgacttaccacctaataaacacagtagaaattgtactgcggcactcccgcgtgtcgatgatgaagcactggataatgtcgcaactccattaatcatcactgaaccaccgccccccgcagaaacattcacttttgcattactggccgcaggtgtcaccgtcaccgaataaccactggtgaaactggtctgattatttgacaacgtaatgttgtttttattggtccattcaaaatgtaaatttaatttaatggtatcgttataaagtccaacaataatatccgacgggctcataggtgtgatagtatttgtactcacgcatgacgaatcattaaaattatgctcatatgtcgccatttgtgtttgagtaagtgcaaaacccccctgaacaaccaaattgtgctgaacagataactcactataacatgccgcatagctcacaggcataaccatcatcattactataaatagcattatgcgaatttccatagaaccacctgactattactggcaaatataatttctactttcatcaatctctttaccgaaggtgattgtgcatgaaagcccttgttgcttatcaattgccacattaaccgatggcggtacttcattggtgcgaataaataactggcttccctggccgacaacaccaatattatgaccatggatatcattgacttcataaccaaacgttaatggttgcccatccgctcttaacgcttttataaaccatggcttgcgctgatcggtatcaaaattaaccagtacaaccgcgccgcgataaggggcggcaattttccggttgccacgtaattctgcttcgctatcgctttgtgacacatccaacatcaggtaattttcccgataaggtgtcattccgtcgtataccaccactccattacggtttgttgtgcgatatttttgcccattgacataagcatctttaattcctggcgcattcatcacagcaaacgtttcagaaagacggtttgccagattaacgccacccgaccaggcgacaatgccccctgaaacactggctccagcctgtcgataagcactcgactgactataactgccattcactgtcgcaaccggcgcgttccaggttaaattcgccccagctgtcgtttcatttccctgatactgataactcaggttgaccccatagttaaactgatcccggcttccaacggttcctgataatcccgtattatttgaggcaaccccctgatcatcaaacgtcgttgagttagacatatatatttgccgacgaggcgtcgtaacgtcatcaccccaatcaaagggaatcgatataaaaatattaaaacgtttctcttcatgatgattctcgtcataagcatggcttgccgcgagggtatagcttatccttcgcaggttgttggaataactcaactgataatccttactgctgccgctacgcccccagtaatctcgccataacgtacttaaggacacagaaccccagccttctggcaatgactgactcatattggcagaaaagctatttttacggccaaaatcgttctggtaataatcggcaatgtcatagatatcgttttcatcacggcgataattatctttattgtttgcccatacgtgatcattaaatgtccggtaatcacgcgacgaataacgccaggccgccagaccaaaacgtgtcgacgtttggctcacaaatttgttgtaggcaatttgataactttgcccgtcaaacacatcgccgttgtcttgtatactatgcgacttcgtggcatcgacggaaatggcaccaatgcgtgtattccagccagtccccaaagtgaacgcgtaataattattcgcgaccatcgatccgccatacagcgtcaataagttattaaaaccatactgataacccgcctgaacaaaatcactttgtttgctcgccccttcaatatggctacgacctgccgcaaaatcatatttcgacacgccgggttgcagcatattcggcactgctgcataaggcaccagataggtggttaccgaaccgtccgcctctttcacgctgacatcaagatctgctccacctccggccaactgcaaatctgtaatcgcaaacgggccaggaggaacctctttctgataaaccacaaaaccattctgttcaatagttaccagcgcgttactctgagcaatcccctgcacccgtggcgtaaaattttgtttcgagttaggcaacatctgcatatcacgaaacaaccgcacaccgctgaagcgaacagaatcaaaaatatcgcttgatgtgtacatatcacccacacgaagcgtgccgagaagttgggcaaatccacgttccagatacagggtattgcttttccacacccctggattgttatttgttttactgaaactggcatcagaatgcagttgccacccctgtaaatttaacccgctgttaaaacgtacatatgtactcttgctattaccggacgctttataatcgctgtaatactgactcacataataagaggtataaaacgcattaataccccgctcccagttttctggtggaacatagccactttccagatcttccacccaggcctgcgggacactgaaatcgagacgaaaaactccgatatcccaggtatagctcccgccctgaataagttgcttaaatgttaaacattgcttaccgctggcaaagctatcggtattaatgcctaaccgcttgatcatttcccttgataaacatgtttcttgcgggttgtctttaacaatgatctcatatttcccacgccattgcttattgacataaatatcgatgtcatacggccccggcaagggctgattatcttcaagacgaatatttgaaacctgctggtctttcattccacctatcatgaaatgggtatcaaaggtttcttcagctgcataagcttcaatgccgatcaataacgctacgattgctgatgcaagtggggtcattctcaacataggcagctcctgcaattaaattttgtcactaatataattgccatggtcatcgataatggtcagatgccagttatttgcattattacttttgacattaacactctgactttctaagggggcaatcataatagtttcataattgactttgacattattagctttgacatccgaaatcgtcacccaattagctgagtcattttttatcaccaatccattgccactgcgatttaccagtaactttttaaaggtcactttatttaccggagcaatacccgctggtcggtaaaacaacttaattctgttttgcatcgcaaacttcagtgcattcttaccttcttgttctggactatttggtggaatatccagaacattcagataaaaaatactctctttattagtgggtagtttattcggcataattttaatttttacttgctgcccggaatttgcccctatttttgccactggtggcgttaacatgaaaggaacctgaattttttctggtggtaatgacgtatcgccatcatcaatccacgcctgcatcagcgaagaacggtttccctggttcatcaactgcaccatcacttctttgtgctctgccgggtaaataatacgcgtcccgtagataacaataccggcatgtgcaggaaggaccatagaagaaatgagtaaagctaataatcctttcatcttaatgcctcttaaattaaaaggccgccatggagatagcggccatgttaattagctgaagaatcttgcaattttatttattaatcctgcgccacacgcataatcagggaagataacacatcacctgaattcactgagttatctgtcagtttcaggtattttgctttaaacggaatggcatattgaccgtccgctgttttataactctcgatgttgaaaggtgcagaaacatccaggacatcgctgttatcacctaaatagagataataacccacggtatcgttgctactggctatcgccttatcgtttccggttattttatcgttggtaatcaacgagagttttacaccagcaacttctttcggacagctaatttttaacatgctgctggttacaccgactgcaccatcataggtcgagtatttagctttaccttcaaagaccgtagttggtacagttggcatattaatacttactgaatcgccacctgcttcgaatttacacggagattctgcaatattccctttaatggttaatgttccggtatcaacgtctgcggcaaataccccagcgctcataaaaaaagaagaaaaaacagcggcagcaataattgaacgtttcataatatgctccttaataaaatctatttttggttgttaagagtctgtatctcttggaaacaaatttctcacaccaaaaaagttgccgcaatgtaaacacattgttttattgatttaaagcaaattaactattgcaatataaacacaacaaatacttaagcacattaaatatttatcaaatctattaattaatgtggatttctataaatggtattattaatatcaataaaaaaagcttaaatcattcatgtaaatgatttaagctttctaaatctgattaaaaccagggtggcaaattaatcgtagcgatttaacacgattcgacgtttgctatcgctatctgcagcaatcacttccgtcgttacacctttaactggcgaagaaacctgatgacgggtatcaacattatacgttaactgaccacaatgctgttgaggttgaccattaaccatagccatactgcatgtcgggggactgatcctaccattaatcgttaatgtggcagtttctgaagagaacgcgggagaagccaatccataggcaagaaaaataattcctgacagccagtacttattcattgaacgttatccctgtagtaaaggttatgcctggaaagaatgagtgcataacaaactatagctgtacatccactacacagccacgaaggatgataatgaagcatcgccggtacgatcaatcgactttgtagagtttcggacgaaggtccgcagaatattcgcagcattaaataagtgttcattaatgcggcaaaaacaaatacaccgcatcaatgtaacatctctgcggtgtatgaagaataatcagaatggttaatacgcgttagaccgcgcggaaggaaatctcgcctggaatgacttcaccctgccagtagagctgagctgcaacgcggtcagccagctggcggtagatagcggtaaattcgctctcaggacggctgataaccgttggcgtgcctttatcgagatcctcacgtaaggagatgtgtaacggcatctgccccagcagctgcgtgtggtatttctcggccagtttctctgcaccaccggtaccgaaaatcggttcatggtgaccacagttactgcaaatatgcacactcatgttctcgacaataccgagcaccggaacctcgactttctcgaacatcacaatgccttttttcgcatcgatcaacgcgatgtcctgcggggtggtgaccacgactgcaccggttagtggaatgttttgtgccaatgtcaattgaatgtcaccggtacctggcggcatatcaagcaccagatagtcgagatccggccacaaggtttcctgcaacatttgcattaacgccttgctcgccattgggccacgccacaccatcgcattgtcgtctgtcaccagataaccaattgaattagttgccaggccatgagacataatcggtgccatatgggtaccgtccggcgaagttggacgctgattttctgcgcccagcatggtagggattgatgggccgtagatatcggcgtccagaatgccgactttcgccccttccgccgccagtgccaacgccaggtttaccgccgtggaggatttacccacgccacctttaccggaactgaccgcgataatgttcttcacgccgttaattcccggctgattcttcacgcgtttcagagtggctatgttatgcgacagtttccagtcgatagctttcgctccggtgatgcgcagcagttcggcgctacattgctcttttaactcttcgaacgcgctatgccagacgaatggcataaccagttccacatgcagcgtgtcgtccatccaggcgacatggtgcaacgctttcagcgttgtgaggttatgcttcagggttgggtgctgaaaattggccagtgtcccggcgaccattgcgcgcaaggcttctggtgatttggcctgggattgttcgttcatcccgactccttttttgtatagataaaccatcagctgatagtttacctgaagaatatagagaagtacttacttaacattttcccatttggtactatctaagcccttttcactattaagaagtaatgcctactatgactcaagtcgcgaagaaaattctggtgacgtgcgcactgccgtacgctaacggctcaatccacctcggccatatgctggagcacatccaggctgatgtctgggtccgttaccagcgaatgcgcggccacgaggtcaacttcatctgcgccgacgatgcccacggcacgccgatcatgcttaaagctcagcagcttggtatcaccccggagcagatgattggcgaaatgagtcaggaacatcagactgatttcgcaggctttaacatcagctatgacaactatcactcgacgcacagcgaagagaatcgccagttgtcagaacttatctactctcgtctgaaagaaaacggttttattaaaaaccgcaccatctctcagctgtacgatccggaaaaaggcatgttcctgccggaccgttttgtaaaaggcacctgcccgaaatgtaaatccccggatcaatacggcgataactgcgaagtctgcggcgcgacctacagcccgactgaactgatcgagccgaaatcggtggtttctggtgctaccccggtaatgcgtgattctgaacacttcttctttgatctgccctctttcagcgaaatgctgcaggcatggacccgcagcggtgcgttgcaggagcaggtggcaaataaaatgcaggagtggtttgaatctggcctgcaacagtgggatatctcccgcgacgcgccttatttcggttttgaaattccgaacgcgccgggcaaatatttctatgtctggctggacgcaccgattggctatatgggctctttcaagaatctgtgtgacaagcgcggcgacagcgtaagcttcgataaatactggaagaaagattccactgccgagctgtatcacttcatcggtaaagatatcgtttacttccacagcctgttctggcctgccatgctggaaggcagcaacttccgcaagccgaccaacctgtttgttcacggctatgtgacggtgaacggcgcgaaaatgtccaagtctcgcggcacctttattaaagccagcacctggctgaatcattttgacgccgacagcctgcgctactactacaccgccaaactgtcttcgcgcattgatgatatcgatctcaacctggaagatttcgttcagcgcgtgaatgccgatatcgtgaacaaagtggttaacctggcgtcccgtaacgctggctttatcaataagcgttttgacggtgtgctggcaagcgagctggctgacccgcagttgtacaaaaccttcactgatgccgctgaagtgattggtgaagcgtgggaaagccgcgaatttggtaaagctatccgtgaaatcatggcgctggctgacctggctaaccgctatgtcgatgaacaggctccgtgggtggtggcgaagcaggaaggtcgcgatgccgatctgcaggcgatttgctcaatgggcatcaacctgttccgcgtgctgatgacttacctgaaaccggtactgccgaaactgaccgagcgcgcagaagcattcctcaatacagaactgacctgggatggtatccagcaaccgctgttgggccataaagtgaatccattcaaggcgctgtataaccgcatcgatatgaaacaggttgaagcactggtggaagcatccaaagaggaagtaaaagccacagccgcaccggtaactggcccactggctgacgacccgattcaggaaaccatcacctttgacgacttcgccaaagttgacctgcgcgtggcgctgattgaaaacgcagagtttgttgaaggttctgacaaactgctgcgcctgacgctggatctcggcggtgaaaaacgcaatgtcttctccggcattcgttctgcttacccggatccgcaagcactaattggtcgtcacaccattatggtggctaacctggcaccacgtaaaatgcgcttcggtatctccgaaggcatggtaatggctgctggtcctggtgggaaagatatcttcctgctaagcccggatgccggtgctaaaccgggtcatcaggtgaaataatcccccttcaaggcgctgcatcgacagcgccttttctttataaattcctaaagttgttctcttgcgattttgtctctctctaacccgcataaatactggtagcatctgcattcaactggataaaattacagggatgcagaatgagacactttatctatcaggacgaaaaatcacataaattctgggcggtggagcaacagggaaacgagttgcatatcagttggggaaaagttggtacccaagggcaaagccaggtaaaaagttttgctgatgctgtggcagcggaaaaagcggagctgaagctgattgcggagaaggtgaagaagggatatgtggagcaagcgaaggataattctttgcaaccttcccaaacggtaacggactctctcaaggtagcggacttatccaccattattcaggaacaaccctctttcgtagcagaaacccgtgcggctgacaaaaatacagatgctgttttaccgtggctggcgaaagatattgctgtcgtttttccgcccgaagttgtacacaccacgttaagtcatcgccgctttcccggagttcctgttcagcaagcagacaaattgacccaattacgtcgcttagcctgtagtgtgtcgcaacgggataatacaacagccacatttgacttcagcgcctgttctttagaatggcaaaacaccgtcgcccaggcgatcagtcagatcgacgacctgaaaacaacacagctaccatcacccgtaatggctgtactcacggcacttgaaatgaaatgcacaagatataaagagcgtgaggatgttatggatcagattattcaggaaggcggtctggaatatgctactgatgtaataatacatcttcaacaaatatctattgaatgggattatgtcaacaataatattgttttcctgtcgtctggcatttcacctgattatttgcagcaatattccagctttgaattacgcctacgtaaacatttatcactggcggaagagtctctctggcaaaaatgtgcacaaaaacttattgccgcagttccacatattccagaatggcggcaaccattaattgctttgttattgcccgaaaaaccagaaattgcacatgaaattgcccagcgtctactggggcaaaagaaattaccctcgctggagtggctaaaaatagtggcgactgatgagcacattcttgcctcattagaaaaatatcacgagccatatgccatttttgatgattactattgtggtgcgatatggtcagccaccgtattacaggagcaaggtgttgcggccctgccccgatttgctccctatgtcgcaagtgactactgcgccgatgtgttgcgtcatatcaatcatccgttcgcattaacactgcttatacgtgtagcagggcatactaaacgctgtcacgatcgaatgacgaaagcctgcgctgcgttcccacacgcagcactggcagcactggcggaacttctagtgcaaaaagaagagaatagttggcgcattatgctaatgacgatgcttatctcgcaaccgacactagcagaacaggtcattccctggctttcgacacccgcagttgcagtgctgaaatcatgccagcaacaactgacacagccctcaaaccatgccagcgccgatctactgccggccatagtagtctccccaccatggctttcgaaaaagaaaaaatcgccgattccggtgctggatttagcaccgctcaacctcgaatccatatgcacaataaccgacacagaagctaaagagtttcaaactcattgggactgggaaccgcataagccaggtgaaggtgctaaaaatttcctttactcgctggggtatcgccgctgggattttgacacatataaatatatcggcgcttctgactcggcaattgacgcatgggaacgtgaggacttcgctacactcatccaaatgtttaaagcccaccatgcaccgtatcagggggagtggcatctcaactcacttccctttttacctatgcaaaaagcgattaagctatgggaatttctcagcaaagagccgcataccgcgataaaaccagtcatgctttatttgcgactggcaggtatgagtggttttctacactcgttttcacgctaccctcaagaaggttttgcggttgctaattattttgccgcaacggaactggctcctgccgtcgcccgcgccttcaacaaactcaaaacattacgacaagacgccagtagctggctgctgaaatacccggaacacgccattaccggcctgctgcctgcagcgctcggcaaagccagtgaagcacaggacaacgcccgtgctgccttgcgtatgcttaccgaaaacggtcatcagccattgctgcaagaaatcgcccggcgttataaccagccggaagtaaccgatgcggtgaacgctctacttgcgctcgatcccttagataatcacccgacaaaaatccccactcttccgaccttttatcagccatcgctctggacgcgcccgttattaaaagcaaacgcccaatcactgcctgatagcgcactcctccacctcggtgaaatgctccgcttccctcaggaagaggcactgtatccgggattattgcaggtgaaagatgcctgtaccaccgactcactggctgaatttgcctgggatctgtttaccgcctggcagaccgctggcgcgccgtcgaaagagagttgggcgttcactgcgttaggcgttctcggtaacgatgacaccgcccgcaaactgacgcctttgattcgcgcctggcctggtgaatcccagcataaacgcgccaccgtcgggttggatattctcgctgctatcggtagtgatatcgccctgatgcagcttaacggcatcgcccagaaactgaaattcaaagcattacaggagcgggcaaaagaaaaaattgccgacattgccgagagccgcgaactcacggtggcggagcttgaagatcggttagcaccggatctcggtctggatgataatggttcgttgttgctggatttcggcccacgccagttcaccgtcagctttgatgaaaccttaaaaccgtttgtgcgtgacgcttccggcagtcgtctgaaagacctgcccaaaccaaacaaaagcgatgatgaatcacaggcgaacgatgctgttaaccgctacaaattgctgaaaaaagatgcgcgtaccgtcgccgcccagcaggtagcaaggctggaatccgccatgtgcctgcgtcgccgctggtcaccggaaaactttcagctcttcctggttgagcatccgctggtccgccacttaacccgccgtctgatttggggcgtttatagcgccgaaaaccagctactggcttgctttcgcgtagcggaagataacagctacagcaccgctgacgatgatcttttcaccctgccggaaggcgatatctctattggtattcctcacgttctggaaatatcaccgacggatgctgccgccttcgggcagctttttgccgactacgaactgttaccaccgttccgccagcttgatcgtaacagttacgcgctgacagaagccgagcgcaacgccagcgaactgacacgctggacaggcagaaaatgcccgagtggtcgggtaatggggctggcgaataaaggctggataaagggcaccccgcaggatgctggctggatcggctggatgatcaaccccctgggccgctggtcgttaatcatggaaatcgatgaaggttttgcggtaggcatgtcgccagccgaactgagtgccgagcaactcttaagcaagctgtggctatgggaaggcaaagcggaaagctatggcagggggagtaattcaacacaggaagcgcagttctccgtactcgatgccatcaccgccagcgagctaattaacgatattgaagccctgtttgaataaggaaagagcatggacaaggaattaccgtggctggcggataacgcccaactggaacttaaatataaaaaaggcaaaacaccactcagccatcgcaattggccaggcgaaccggtgcctgttatcactgaaagcatcattcagacactgggtgatgaattgctacaaaaagcagagaagaaaaaaaacattgtctggcgttatgaaaacttttcactggagtggcagtccgccatcacgcaggccatcaacttgatcggcgaacacaaaccctcaatcacggcccggacaatggcggcgctagcctgtatcgcgcaaaatgatagccaacagttgctcgacgaaatcgtccaacaagaggggctggaatatgcaactgaggtggtgattgcacgccagtttattgtacggtgttatgagagtgatcctctggtagtaacattgcagtatcagaacgaggactatggctatggttatcgctcagaaacctataacgaattcgatctccgattacgtaagcatctctctctggcagaggaaacctgctggcagcgttgcgccgacaaactcattgccgcactgccaggaataaccaaagttcgccgcccttttattgctctgaacctcccggaaaaacccgaaatcgccaacgagctggtaagccttgaatgttcgcaaactcattttcgctcaaaagagtggttaaaagttgttgctgatgaccctaaggcggtgaaagaactcgcacgctactggagccaggatatatttagcgatcgagaagccagctacatgtcgcatgaaaaccacttcggttacgcggcctgcgctgcccttttgcgcgaacaaggactggcagccgttccgcgcctcgcgatgtatgcacataaagaagattgcggcagtctgctggtacaaattaaccatccgcaagtcatccgcaccttgctactggtggctgataaaaacaaacccagcctgcaacgtgtggctaaatacagtaaaaacttcccccatgcgacgctcgccgcactggcagaactgctggcgttaaaagccccccctgcgcgccctggttatcccatcatcgaagaccaaaagctgcctgcacagcaaaaagcacgtgatgaatactggcatacgctgttacaaacgctgatggcatcgcagccacaactggcagaagaggtgatgccgtggttaagtactcaagcccaggcagtggtgaatggttatttatcggcatcgccaaaacttgctttcgagagtactcatagcaacgacctgccagaaatacttgtttctccaccgtggcgaggtaagaaaaaaacggcattgctgcgccttgatttagtgcctcttgaattagcgcccaaagcccgctggcaaccaggcgaacgagagagacttgccgccacagagtctgcccgttatttcagcacgggatcttttacggaacgcatggaacgaaaaagtggtcgagttgtactacaggagctaggttttggggatgatgtatggctgttccggaattatatactgcccggcaaactggatgcggcgcgcaaatcattagtgggtcagtggcattactccccgcgcagagtagaggaaatcaacaatggctggcactccacggaagcaaaatcagccgaacaggcgcttcgttccggcgacgttgaagcgttaattaacacctgggaaaatgatagctactcacgttatcgtccggaaaagagtgtctggaacctgtatttattggcacagttgccgcgtgagatggctttgactttctggctgcgtatcaatgagaaaaagcatctgttcgcgggtgaggactattttctcagtatcctcgggttggatacattacctggcctgttattggctttttcacatcatccaaaagaaacatttccgttaattttaaatttcggcgcaacagaactggccctgcccgttgcccgcgtctggcgacgtttcgcggcgcagcgtgatctggctcgccagtggattttacaatggccggaacatacggctactgcacttatccctcttgtctttacaaaacccagcgataatagcgaagctgcattacttgccctgcgtttactgtatgaacaagggcatggcgaattactgcaaaccgtggcaaaccgctggcagcgtacagatgtatggcctgccctggagcaattacttaaactgggtccaatagaaatttacccggcacgtattccaaaagctcctgatttctggcatccggcaatgtggtccaggccgcgccttatcaagaataatcagcctgttaccgatgacgctctggaaattatcggcgaaatgctgcgctttacccagggcggacgtttttatggcggactggaacagctgaaaacgttttgccagccgcaaacgctggcagcttttgcctgggatcttttcaccgcgtggcaacaagctggagcccccgcaaaagacaactgggcatttctggcgttaagtctctttggtgacgaaagcacggctcgggatctgacgacacagatcctcgcctggccacaagaaggcaaatctgcccgtgctgtcagtggcctgaacatccttaccctgatgaataatgatatggcgctgatacagctgcaccatatatcccaacgggcgaaatcccgctccttacgtgataacgcggcggaatttcttcaggtggtcgcagaaaatcgcgggctaagccaggaagagttagcggacagattagtcccaacactgggtcttgatgatccgcaggcgttgatttttgattttggtccacggcaatttaccgttcgcttcgatgaaaacctcaacccggttatctacgatcaacaaaacgttcgccagaaaagcgttccccggttgcgcgccgatgacgatcaactgaaagcccccgaggcactggcccgactaaaagggctaaaaaaagatgcctctcaggtgagcaaaaacctgctcccgcgtcttgaaactgccctgcgcaccacccgacgctggtcgctggcagattttcattctctgtttgttaatcatccctttacccgcctggttacccagcgattaatatggggggtttatccggcaaatgaaccgcgtcgtttactcaacgcctttcgtgtggccgcagagggggagttctgcaatgcacaagatgagtccattgacctgcctgcagatgctctgattggcattgcccacccgttagaaatggcagcagaaatgcgcagtgaatttgcacagctttttgccgattacgaaattatgccgccttttcgccagttggcgcggcgcacggtgctgctcacacctgacgagtcagccagtaacagcctgactcgctgggaaggtaaatccgctaccgttggtcaacttatgggaatgcgatacaaaggctgggagtcaggctatgaggacgcatttgtctatgacttaggtgcgtaccggctggtccttaagttttcacccggctttaaccactacaatgttgatagcaaagcgctaatgagcttccgttctcttcgggtttaccgtgacaataaatccgtcacttttgccgaacttgatgtgtttgatttgagtgaagcgttaagcgcacccgacgttattttccattaaaacacagcgggcagtgatgcaactgcccgttatcaacacgacctaccagcgggggaagcgatgatcgtgcaaaaagagctggttgctatttacgattatgagatccctgtacctgaagagccgttttctttcagacttgaaatccataaatgctctgaattatttacaggttccgtctatcgactggagcgattccggctacatccaacatttcatcaacgtgatcgagaagatgccgaccactaataaatgatgcgttgatttatacaagagatgagtttattgatgagcggaaattacgaggtgaatcacatgaaactgtaatagcaatttttaattgtgaactacagaatatattcaaccaagaaatagaataatatactcatcatacttcaagtcgcagcatatgcaacttgaagtatggcgagtaaagctttattaaagggggaaacggtattcccccttagatgcgtttcaatttgcccgttacttcaacaaatcaatcaaccgtaacagagccactaatagctccagtacagcaatgagcacggttaacttttgtgtcagcgtgtccatccgctctccttattaaggagcgcaacaccagcaccttacccttacactgcctgtcgatactggtttacgtatgttggaccacgatgttgcactccggatcagggcaccacctacagcaccacccgtccggtagccaggacttgaaattggttcgatccggcgcaacctcccaacagtcaggattataaatctcattatcttaattgcaacggggtccagcggtggttataattcgttcgttggaacacgatgttgcacaggctgcggtgttaggcctgaaagtagtaaataaaagaacctgcctcaccagcaggtttttttattttttgcgatctgctttccagatattttccgctcaaacaactaatgcgccaaacagttattgcgcgtaaaatatcgtttatttcattaatacatttcagggatgaatatatgtcaccgcagaataatcacctgcagcgtccgcctgctgctgtgttatacgccgttgaactggcaaaattaaaacaaaatgataacgcaccttgcccgccaggttggcagttaagtttgcctgcggcccgtgcttttatccttggcgacgaagcgcaaaatattagccgtaaagtggtgattagtccctctgctgtcgaacgcatgttagtcactcttgccaccgggcgcggtttgatgttggtgggggaaccggggaccgcaaaatctctcctgtctgaattactggcaaccgctattagcggcgatgccaggttaaccatccagggcggcgcatctaccaccgaagatcaaatcaagtacggctggaactacgccctgcttatcaatcatggtccgtcaacggaagcgctggttcctgccccgctttaccagggaatgcgcgacggcaaaatcgtccgttttgaagagataacgcgtacaccgctggaagtgcaagactgtctgttaggtatgctttctgacagggtgatgacggtgccggaactcactggtgaagccagccagctctatgcacgggaaggctttaatattattgccactgccaatacgcgcgatcgcggcgtcaatgaaatgagtgccgcgctaaagcgtcgcttcgattttgaaactgtctttccgattatggatttcgcccaggagctggagcttgtcgccagtgcttcggcgcgtttgctggcccatagcggcattccgcataaagtgcctgacgcggtactggagttactggtccgcacctttcgcgatctgcgtgccaacggcgaaaagaaaacgtcaatggatacactaacagcgattatgtccaccgctgaagccgtgaacgtggcccacgcggtgggcgtccgcgcctggtttttagcgaatcgagcaggtgagccagccgatctggtggactgtattgccggaaccatcgtcaaagataacgaagaagatcgcgcgcgcctgcgccgttacttcgaacagcgtgtcgccacacataaagaagctcactggcaggcttattatcaagcccgccaccgcctgccgtgaggaaagatgcatgagcgagccgttaattgtcggcatccggcatcatagcccggcctgcgcccggctggtgaaatcgttaatcgaaagccagcggccacgatacgtattgattgaaggcccggctgattttaatgaccgggtagacgaactgtttttagcccaccagcttccggtagctatttacagttattgccagtatcaggacggtgcggcccccgggcgtggtgcctggacgccatttgctgaattttcgccggagtggcaggcgctacaagccgctcgtcgtattcaggcacaaacttacttcatcgatttgccttgctgggcgcagagtgaagaagaggacgattcgcctgatacgcaagaggaaagccagaccttgctgctgcgtgccacccgcatggataacagcgacaccctgtgggatcacttgttcgaagatgaaagccagcaaactgcattaccctctgcgctggcgcactattttgcacaactgcggggcgattcccccggagatgctctcaatcgtcagcgcgaagcctttatggcccgctggattggatgggcgatgcagcaaaataatggcgacgtgttagtcgtctgcggtggctggcacgctccggcactggcaaacatgtggcgcgaatgcccgcaggaaattaacaagccagaattgccctcgctggcagatgccgttactggttgttatctcacaccctacagtgaaaagcgccttgatgtgctggcaggatacctttccggaatgcctgccccagtctggcaaaactggtgctggcagtgtggcttacagcaggcaggtgaacaactgctgaaaacggttcttacccgtttgcgccagcacaaattgcccgcttctaccgctgatatggctgcagctcatctgcatgtgatggcactggcacagttgcgcggccatacactacctctacgcactgactggctggatgccatagctggctcgctgattaaagaagccctgaatgcgccgttgccatggagctaccgcggagttattcatcccgataccgatccgattctgctaacgttgatagacacattagcgggtgacggattcggtaaacttgccccctcgacgccacagccacctctgccaaaagatgtcacctgcgaactggaacgtaccggaatctctcttccggcggagcttaccttaaatcgctttacccccgatggactggcgcaaagtcaggtgttacatcggctggtaatactggagatcccaggggttgtgcgccagcagggaagtacactgacacttgcaggcaacggtgaagaacgctggaaattaacccgcccgcttagccaacatgcggcattaattgaggccgcctgctttggtgccacactccaggaagccgcacgccataaattagaagccgatatgctggacgcgggtggaatcggcagtatcaccacatgtcttagccaggcggcgttagcgggtctggcgtccttcagtcaacaattactggagcaacttacattattaatcgcccaggaaaatcagtttgccgaaatgggccaggcgctggaagtgctttacgccttgtggcagctcgatgaaatcagcggtatgcaaggcgcgcagatattacaaacgacgttatgcgcggctatcgatcgcacgctgtggctgtgtgaatctaacggcagaccggatgaaaaggagtttcacgctcacctgcatagctggcaagcgctttgccatatcctgcgcgatctacatagcggcgttaatttacccggcgtttctctttctgcggcggtagccttactggagcgacgcagtcaggcgattcatgccccggcgctggatcgcggcgcggctcttggcgcactaatgcgtctggaacatcccaacgccagtgccgaagcggcgctgacgatgctggcgcagttatccccggcacaatccggcgaggcgctgcacggtttgctggcgctggcccgccatcaactggcctgtcagccggcatttatcgccggtttcagtagtcatttaaatcaactgagtgacgacgattttattaacgccctgcccgatttacgcgcggcgatggcctggctaccaccacgagaacgcgggacgctggcgcatcaggtgcttgagcattaccagctcgcacagcttcccatttcagcgctgcaaatgccgttgcattgtccaccgcaagccattgcacatcatcaacaactcgaacagcaggcactggcatcgctgcaacactggggagttttccatgtctgaactgaacgatcttctgaccccccgtgagctacaacgctggcgattaattcttggcgaagcggcagaaacgacgctttgtgggctggatgacaacgcccggcagatagaccacgcgctggagtggctgtacgggcgcgatcctgaacggctccagcgtggtgaacgctccggtggattaggtggctcaaatctcaccacccctgagtggatcaacagcattcacacgctgtttccgcaacaggtgattgagcggctggaaagcgatgccgtgctgcgctacggcattgaagatgtggtgacgaatctcgacgtgctggaacgtatgcagccttcggaaagcctgctacgcgccgttttgcacaccaaacatctgatgaatcccgaagtactggctgccgcccgccagatagtgcgccaggttgttgaagaaattatggctcgactggcaaaggaagttcgtcaggctttttctggtgtccgcgatcgccgtcgccgctcatttattccactggcgcgaaactttgatttcaaaagtactctgcgcgccaacctgcaacactggcacccgcaacacggcaagttgtatatcgaatccccccgctttaacagccgcattaaacgccaaagcgaacaatggcaactggtcttactggttgatcaaagcggatcgatggtcgattcggtgatccactctgcggtgatggcggcctgtttatggcagttacccggtattcgtacccatctggtggcgtttgacaccagcgtggttgatctcacggcagacgttgctgatccggtagagttattaatgaaagtacaactgggcggcgggaccaatatcgccagtgccgtggagtatggtcggcaacttattgaacaacctgcaaaaagtgtcattattctcgtgagcgatttttatgaaggtgggtcatcatcattgctgacgcatcaggtgaaaaagtgtgtccagagcggcatcaaagtgctggggctggcagcgctcgacagcaccacaacgccttgctatgaccgcgatatggcccaggcgctggttaatgtcggcgcacaaatagccgcaatgacaccgggcgagctggcttcctggcttgcggagaatcttcagtcatgaattcactacgtccggaattattagaactgacaccacaggcactgacggcgttaagcaatgccggttttgttaagcgcagccttaaggaactggaaaatggcaacgtcccggaaatcagtcatgagaacggcgctttaatcgccaccttcagtgacggtgtccgtacccagctggcgaacggccaggcactgaaagaggctcagtgcacctgcggggccagcggcatgtgccgtcatcgcgtgatgctggtgttaagttatcaacgactttgtgccaccgcccagcctacggaaaaaaaagaagaagagtgggatccggcaatctggctgaaagaactggctaccttgcccgatgccacccgcaaacgcgcgcaggcgctggtcgctaaaggcatcaccattgagttgttctgtgcgcctgacgaaattccctctgcccgattaccgatgagcgatgtgcgtttttattcccgcagcagcattcgcttcgcacgctgtgattgcattgaaggcacactttgcgaacatgtcgtactggctgtgcaggccttcgtcgaggccaaaactcagcaagcggaatttactcatttaatctggcagatgcgcagtgaacacgtcacatcatctgatgatccgtttgccagcgaagaaggcaaaacgtgtcgtcaatatgttcagcaattaagccaggcattatggctgggcgggataagtcaaccgccaatccattacgaggccgctttcagtcgcgcgcaacaagcggcggaacgctgcaactggcgatgggtgagtgaatcgctacggcaattgcgcgccagtgttgatgccttccacgcccgtgccagccactaccatgccggagaatgcttacgtcagcttgcggcattaaacagtcgattaaattgcgtacaagagatggcgcgacgcgacagtatcggtgaagttcctcccatgccgtggcgcacggtcgttggcgctggtattgccggagaagcaaaacttgatcatctgcggctggtgtctttaggtatgcgttgctggcaggatattgagcagtatggtttacgcatctggtttaccgatcccgacacaggaagtattttgcatctttcgcgtagttggcagagaagcgaacaggaaaactcaccggcagcgacgcgtcggctgtttagttttcaggctggcgcactggccggtgggcaaattatttcacaagcagcaaaacgcagtgccgatggcgagctgctgttagctacccgcaaccgcttaagcagcgttgtgccgctgtcgcctgatgcctggcaaatgttgagcgcaccgttgcgccagccgggcattgtggctttgcgggaatatttacgccagcgtccccccgcctgcatacgaccaatcaaccaggtcgataacttatttattctgccgatagcggagtgtatttcgctcggttgggatagcagccgccagacgctggatgcgcaggtaatcagcggcgaaggggaagataatgtgctgacgttatcccttccggcatctgcctgttctccttttgccgttgaacgcatggcggcgcttttgcaacaaacagacgaccccgtgagtctggtttctggctttgtcagttttgtagaggggcaattgacactggaaccacgggtgatgatgacaaaaacccgcgcctgggcgctggacgcagaaactgcgcctgtggcaccgctaccttctgccagcgttctgcctgtgccgcctaccgctcatcagttgctgatgcgctgccaggcgttacttattcaactgctccataacggctggcgctatcaggaacagagtgctattggtgaggcagagttgctggcgaatgacctcaccgcggtgggtttttatcggctggcacatgtgttgggacaatttcgtaatacagaaagcgaggcacgggtagaagcaatgaataacggtgttttgctttgcgaacaattattccccatgcttcagcaacaaggatgaaatagtgctttttattaagagttctactcctgttccggactgctcacgccacagtattaggcatatcctatatagcccctggtgagagtcaccagttccttgattaaataaaatggagttttacatgaaggctttcaataagctgttttcccttgttgttgcatctgttctggttttctctcttgctggctgcggtgacaaagaagaatcaaagaaattcagcgccaatctgaacggcactgaaattgccattacctatgtctacaaaggtgacaaggtgcttaagcaatcttctgaaaccaaaattcaatttgcctccattggtgcaaccaccaaagaagatgccgccaggacacttgagccgttaagcgctaaatacaaaaacatcgcgggtgttgaagaaaaattaacctataccgatacctacgcgcaggaaaacgtgactattgatatggaaaaagtggattttaaagccctgcagggtatttcaggaatcaacgtttctgctgaagatgctaaaaaaggtatcactatggcgcaaatggaactggtgatgaaagccgctggttttaaagaagtgaaataatctgtcggcggccatgtttcgcatggccgccatacccgtcttagcttttcttcacatgctggcgcgctgccagtccacgcagaaaataacgtaaaaattgatcgccgcattcgcggaagtttttatgatccggtgcacgcatcatcgccgtaatttccggcatcgatacgcggaactgctgttcggtgaggattgccagaatgtcatcggttttaagcgaaaacgcgatgcgtaattttttcagcacgatgttgttattaatgcgacgttccggctccagtgccggagcagactcatccttgccgcgtttttcataaatcaggccattgaggaatgaagacaaaacaatgtccggacaacgctgaaaaccctcttcgtcttctttacgtagccagacggcgatctgttccgcggtggcttcgacattacccagcgccagaatacgcaccaggtcattattattggctttcaaaatgtagcgcacgctgcgcagaatatcgttacttagcatgaggccttcaggtgttgatgaggcaaaaagccattttagcagtcttttacaggccaatcgcctcttttaagcttttcagataacggcggctgaccggcacggttaagccattacgcaaaatcaactcggcctggccgttatcttccagacggatctcctgtaaatgcgcgaggttaaccagatactgacgatggcagcgcagtagtggggtacgactttccagggtacgtaatgtcagttcggtaaagccctctttcccttcgtgactggtaacgtagacaccgctcatccgactgctgacaaatgccacatctttcatttgcagcaaataaatccgactatgccccgtacaagggataaatttcagcgcctgttgattttccggtaacaacgaaacatcctgcttgctgcgctcctgacgcaatcgcgccagcgttttctccagtcgcgcttcatcaattggcttcagcagataatcaaaggcatgttcttcaaaggctttaatggcgtattcgtcaaacgcggtgagaaaaacaatatacgggcgatgttccgggtcgagcatccccaccatttccagaccactgatgcgcggcatctggatatcgagaaacagcacatccgggcgcagtttatgcaccgcgccgatcccttctacggcgtttgaacactctccaacgatttcaatatcgctctgctcctgcaaaaatacgcgcaggttctcccgtgctaacggttcatcatcgacaattaagactttaatcatgcctcgtccctccatggtagtcgtaacgttattcgggtgtaactatcaggctcacaggcgacgcttatcccatagtcatcgccaaaccgttcacgtaaacgcttatccaccagattcatccccagcccactggcattggttaccggttgatacaaaccggcattgtcttcgatctccagcatcaaatgttgcccctcacgtcgggcgctgattgccactcgccctgtatccagcagttgtgatgtcccatgtttaatggcgttttccactatcggttgcagggtaaacgcgggcaattgctgctgggataattcttgcggaatagcaatgttgacctgcaaccgcgactggaagcgcgccttttcaatttgcagataagcgttcacatgttcaatttcgtcggcgagagtaacaaactccgaaggccgctttaagtttttgcggaaaaaagtggaaagatactgcaccagctggctggcctgttcgctgtcgcggcggatcaccgctttaatggtgttaagcgcattaaacaaaaaatggggattcacctgggcgtgaagcagtttgatctctgactgggtgagcatcgctttttgccgctcatattgcccggcgaggatctgcgccgaaagcagttgcgcaatcccctcgcccaacgtgcggttgattgaactgaataaacggtttttggcttcatacaatttgatggtacccatcactcgctgattttcaccacgcaacggaatgaccagcgtcgaccccagtttgcattgcggatgcaaagagcaacggtaaggcacttcgttgccatcagcgtagaccacttcaccggtttcaatcgcttttaaggtataagtcgaagaaattggtttgccgggtaaatggtggtcgtcaccaattccggtaaaggccagcaatttctctcgatcggtaatcgcgactgcaccaatatccagctcctgatacagcacctgtgccactttcatgctgttcacttcgttaaacccctggcgcaaaatgccttccgtcgaggccgccactttcagcgcagtggcagaaaaagccgaagtgtatttttcaaacatcgcgcgtttatcgagcaatatacgcataaacaacgccgcgccgacggtattggtgaccatcattggcgcagcaatattactcaccagacgcaccgcatcttcataaggtcgggcgatcgccaggataatcaacatttgcaccatttcagcgacgaacgtgacggcaccggcggtaatggggttaaagactttatcagtgcgcccgcgacggatcaggatgctgtgtaccaggccaccgagcaatccttcaacgatggtcgagatcatgcaacttagcgcggtcatgccccccatcgaatatcgatgtaacccgccggtcagaccaaccagcccaccgacgaccggaccgccgagtaagccgcccattaccgcacctatcgcacgggtattggcaatagaatcgtcaatgtgcaacccaaaccaggtgcccatgatgcagaagatggaaaagacgatgtagcagagaaatttatgcggcagacgaaccgtgacctgcattaacggtatgaataatggcgttttactcattaaccacgcaatgactaaaaaaacgcacatctgctgaagcagcagcaacaccagattaaaatcgtacatacccgcaaaccacacttccctttaaaacgcgtaacatacattgcttgcgtttaactttctttgaactcttgcagaaaaatgagaattcgtgagtacgatcactcaaaatcgcctggcaaaaataaaatcaccctatagatgcataaaaaacgggcaaaactacctggttcgcaaaactgcgtctaaagttaaaccgggacctcgcgagcaagggtgagacgatggcgctttacacaattggtgaagtggcgttgctttgtgatattaaccctgtcacgttacgcgcgtggcagaggcgttacggattgctgaaaccgcaacggacagacggcggtcatcggctgttcaacgatgccgatattgaccggatccgcgagatcaaacgctggatcgacaacggcgtgcaggtcagcaaagtaaaaatgctgctcagtaatgaaaatgttgatgtgcagaacggctggcgcgatcagcaagaaacattactgacttacctgcaaagcggcaatctgcatagcctgcgaacgtggatcaaagagcgcggtcaggattaccccgcccagacactcaccacacatctgtttattcctctgcgccgacggcttcagtgccaacaaccgactctccaggcgctgctggcgatcctcgacggcgtactgatcaactacatctctatttgcctggcttcggcgcgcaaaaaacagggtaaagatgcactggtggttggctggaatattcaggataccactcgtctgtggctggagggctggattgccagtcaacaaggatggcgcattgatgtcctcgcccactcgctcaatcaactacgccctgaactgttcgaaggccgtacattgctggtatggtgcggtgataatcgaacctccgcccaacagcagcaactcaccagttggcaggaacaaggccatgatattttcccactcgacatttaatgattcgttaacaaatacgctttactgtacaatcctttcgttaacataaggagtgcattatgcgcatagctaaaattggggtcatcgccctgttcctgtttatggcgttaggcggaattggtggcgtcatgctcgcaggttatacctttattttgcgtgctggctgaacgcctgcaccagcctttcaaacaggcggtctgcgatgatcgccgccagtgccaccagtaacgctccctggatcacatacgcggtattaaatccgctaagcccgatgatgatcggcgtacccagcgtgttggcccctaccgttgaggcgatcgtcgccgtgccaatgttgataatcaccgaagttcgtacacccgccagaatcaccggagctgccagcggtagctcgaccttacgcagtcgctgaccacgactcattcccatacctttcgcaacttctgtcacgctggcatcaatcgctcccagcccggcaagtgtcgcctgcaggacgggcagcacgccgtaaaggatcaaggcgataatcgctggtttcagaccaaagccgatcaccggaacggcaatcgccagcaccgcgacgggcggaaaagtctgcccaacggcggcaatagtttccaccagtgggcgaaattccgcaccccacgggcgagtgacagcaattccggcaccagtaccaatgatcaccgcaaacaaactcgaaattcccaccagccagaaatgagccagtgccagagctgcaaagctttcctgctgataaacgggtcgtggcagttgtgggaacaaggcagcaaacagcggctggctgtaaggcagccagaaaatcagcgccacaaacagagcaatcagccagaacagctgatcgcgcaacatcttcatacgattacgcctcctccagcagatcctgaaaatgcagcgtgccgcaaggctcgccctgcgtgttcaccaccggcagcacttcacatccccgcgcgacaaacagggagagcgcatcgcgtagcgtcatctcttctgccagcgcctcaccttctgcccgttcttcgcgacgcacgtaatccgccacgctacgtaacgaaagcaggcggacacccagttcactatgcccaaaaaactggcggacaaaatcattcgccggatgagtcagcatcgccagaggattgccctgctgcacgacttcaccgtgatccatcaataccagatgttctgccagccgtagcgcctcatcaatatcatgagtgaccagcacaatagtgcgcccctgcaaacggtgaatgcgcgtcatctcttgttgcaacgcgccacgcgttaccgggtccagtgcgccgaatggctcatccatcagcaagacttgcggatcggcagccagcgcgcgggccactcccacacgttgctgctgaccgccggaaagctgatgcggataacgctcacgcaaatccggctccagccccagcagcgccattaattcgtcgatacgatcgtcgatccgcgcccgcgaccatttttgtaattgcggcacggtggcaatgttttgcgccacgctccagtggggaaacaggccaatagattgaatggcatagcccatccggcggcgcaactccagcactggcagcgagcgaatttcttctccggcaaagcggatcacgccactgtcatgctccaccaggcggttaatcattttcagagtggtggatttaccggagcctgatgtaccaatcagcaccgaaaaactcccctcctgaaaattgagattgagatcgttaacggctttttgtgtgccgaacagtttgctgacatggctaaattcaatcattacgtttcaccttcagcagtgcgataagcaaatcgaacagcgcgtcggtaagcaccgccagaacaattaccgggatcacccccagcaacactaaatcaatggcactgcttaacagcccctgaaaaaccagcgcaccaaaaccgcctgcgccgattaacgccgcaatcaccgccatgccaacggtttgcaccatcaccacccgcaggctgcgcagaaataccggtaacgccagcggtaactgaacatgcaggaaacgctgcgtcccgctcatccccatcgctctggcgctctccagcacatcgcgcgggatctggttcaagccgactactacgccgcgcaccagcggtaacagggcatagagcaccagtgcaatcagagcgggtgtcattccggttcctgctatgccgagcgttcccagccacggaaaggccgtaaccagcgcggcaagcggcgcaatcaacaggccaaagagcgctaccgaaggcacggtctgaatgacattcagcagagaaaaaatcgccccttgccgcgcggtggaaaagtagcaccagatgcccaacggcacaccaatcactaacgcaggcagcaccgcaccaaacagcaacgtcagatgttgtgccagcgcgtcgtcaaacacatcctgacggttggcgtattctttcattaacgagagatcgttaagcgtgccggagtacagcaaccacagcggaacaatggcaatctgcatatgcaacaaccagcgccacagcggatgcgtggagattcggcggatggcatcgctacaggccagcagtgccagcgccgcagccagccagaaaccacttccgaggcaggtacgcgccagcgcactaccattttgcgccagttgtgtcgccgcctttccagctccccacaccagcaatacgaagacgaattgcgccagaatgagtgcaaaaatgctgccttttttagcgggaataaaacaggctgtcagccaggcgcaaccaacgcccaccagcatccagagagtttgcggccacagctgccagagatgacgcccctcacccgaaactaaacgattaggtgcgtaactgataaacggcagcgccgctgcgattgccgtcagcaacagcagcagcgccagaacaggattaatacggaaataagtcacgggaaattacttcgtccaccctttttgtgtcaggtagtcggctgccacttttttggcatccagtccttccactgcaatgctggcattcagctgctgcaatgttttttcatcgaggctggcgaagactggctgtagccactgtgctatttgcggatactctttcagcaccgactcacgcaccactggcgcaggcgcgtagataggttgcacgccttgcggatcgcttaaggtttgcagccccagcgccgcaaccgggccatcggtgccgtaagccattgcggcattaacgccagaagtttgctgggcagcggctttgatcgtcaccgccgtgtcaccaccggccagtgacagcaactgatcctgaccgagcttaaagccataggctttttcaaacgcgggtaaggcatcggcgcgttcgataaactctgccgaggctgccagtttgaagttgccaccctctttcagataacgactcagctcggcaagcgaagtgagtttgtttttctctgccacatcctgacgcacggcgatggtccaggtgttatttgcaggcgcgggcgtcagccagattaacttgttttgctctgcatcgagttttttgactttctcatagccttgctgcgcgtttttccataccgtatcgttttcatctttaaagaaaaacgcgccattgccagtatattccggatagatatccagctcgccagaagtgatcgccccgcgcactacgggagtcgttcccagctgcactttatttaccgtaggaacgccgtgactttccagcacctgcaaaatgatattgccgagcagcgcgccttccgtatcgatttttgaaccaaccttaacgggggaagccgcctgtagcggcaggctcacggctgccaacaaaaccagtgaacctgcccagagctttgagagtggcatgatgctttcctcattcttttactgttgttttcagcgaattaagagaaaagcatagttgataatgacagggttagcctgtctggacggattcagttgcagaatcagataaatacttaaagggcatattttgcccggcgtttcttgccggatgcggcgtaaacgccttatccggcctacaaacatcgaaaattacaacaactcaaactcggctttcttaacgcgtgcggaatcagtgccgatgaagacattgaacttgccaggctcggcgtcatatttcatctgttgattccagaacttcagcgcctcaatatcgattgggaagctgacggtctgagtttcgcccggtttcagggtgattttctcaaagcctttaagctgcttcaccgggcgactcatggaagccgtcacatcctgcaagtacatctgtactaccgtggccccttcgcgtttaccggtgttcgtcacctgcacgctggccgtcactttgccgtcacgcttcatggtcggcgcagaaagtttcacatcagagacggtgaaagtggtgtagctcagaccatagccgaacggataaagcgccccgttagcttcatcaaaataacgcgaagtgtatttgttcggcttgtcggcattatacggacgcccggtattcagatggctgtagtacaccgggatctgcccgacagaacgcgggaaggacatcggcagcttgccagacgggttataatcgccaaacaatacatcggcaattgcattaccgccttcagtccccgcaaaccaggtttccagaatcgcatcagcctgctgatcttctttcaccagcgccagcggacgcccattcatcagcaccagcaccagcggtttaccggtggctttcagcgccgcaatcaagtcacgttggctttgcggaatagtgatatcggtacgactggaagcttcgtgcgccatcccctgagcttcaccgaccacagccaccaccacatcagattgtttcgcggtttgcaccgcttcatcaatcatctcttgcggcgaacgcggatcaactttgaccgcctcttcatactgattcaggaaatcgataatgcctttgtcactggtaacgttcgcccctttggcatacagcactttaccgttttcaccgacggcgtttttaatccctgttagcacagtaacagattgatcggcgacacctgccgccgaccagcttcccatcacgtcacgcttgctgtctgccagcgggccaaccaccgcaatggttgcagattttttcagcggcagcgtttcgagacgatttttcagcaacaccaggctttcgcgcgccacttcacgcgcttctttgcggtgcaggcggctttcggcattggtatccaccgggtcagactctttcggccccaaatggctgtatggatcgttaaacaatcccatatcatatttaacgttcagtacatggcgggcagcatcgtccagctcttccatcgtcactttgccggatttgatcaacccaggcagatacttcgagtaatactcgtcgctcatgctcatgttgattccggacttcagcgccacgcgtaccgcatcttccgggtctgccgccgtgccatgtttaatcagctctttgattgcaccgtgatcggaaacggtgatgcctttaaagccccactggtcgcgcaggacatctttcagcagccaggaatcggaggtggctggcgtgccgttcagcgagttcagcgccaccatcaccgcgccgctgcctgcgtccagccccgctttgtacggcggcatataatcattaaacaggcgctgcggactcatatcgacggtgttgtactctttaccgccttctaccgcgccgtaagcggcaaagtgtttgacgctggtcatcaccgagtagcgatctgccggacttttaccctgcatcgcttgcaccatggttttacccattattgaggtgagatacgtatcttcgccaaaaccttcggaagcacgtccccagcgcggatcgcgcgaaacatcgaccatcggtgcccaggtcatgttcaggccatcatctgccgcttcataagcagagacacgcccgactgttttcactgcatcgaggttaaaagacgaggccagaccgaggctaatcgggaacaccgtgcgctgaccgtgcagcacgtcgtaagcaaagaaaagaggaattttcaggcggcttaattccatcacctgatcctgcatggcgcggatatcctgacgggttacggtgttgaaaatcgcccctacctgcccgtctttgatcatctcgcggatcgcctctttcggattatccgggccgacgctgattaaacgcagctgaccaattttctcatcaactgtcattttcttaagcagttcggtgacgaacgcatcccgcgcttcgggcgttaatggatggttgccgaataaatcatccgccagtgctggctgcagggccagactcaccgcgattcctactgaacatagccatttcatatggatttttcttcctctgttgcccgacgaggcagcgaaaatggtgcaaaaaccgtagtttgccataagcatgatggagagagaaaaagaatgctcagtttattgtctgaattttcaaaatattcactcgctgaattgtcatacaaggcgctattctagtttgtgatattttttcgccaccacaaggagtggaaaatgtcttccatgacaacaactgataataaagcctttttgaatgaacttgcccgtctggtcggtcattcacacctgctcaccgatcccgcaaaaacggcccgctatcgcaagggcttccgttctggtcagggcgacgcgcttgctgtcgttttccctggctcactactagaattgtggcgggtgctgaaagcctgcgtcaccgctgacaaaattattctgatgcaggctgccaatacaggcctgaccgaaggatcgacgccaaacggtaacgattatgatcgcgatatcgtgatcatcagcaccctgcgtctcgacaagctgcacgttctcggcaagggcgaacaagtgctggcctatccgggcaccacgctctattcactggaaaaagccctcaaaccgctgggacgcgaaccgcactcagtgattggatcatcgtgtataggcgcatcggtcatcggcggtatttgtaacaactcgggcggctcgctggtgcaacgtggcccggcgtataccgaaatgtcattattcgcgcgtataaatgaagacggcaaactgacgctggtgaaccatctggggattgatctgggcgaaacgccggagcagatccttagcaagctggatgacgatcgcatcaaagatgacgatgtgcgtcacgatggtcgtcacgcccacgattatgactatgtccaccgcgttcgtgatattgaagccgacacgcccgcacgttataacgccgatccggatcggttatttgaatcttctggttgcgcaggtaagctggccgtctttgcggtacgtcttgataccttcgaagcggaaaaaaatcagcaggtgttttatatcggcaccaaccagccggaagtgctgaccgaaatccgccgtcatattctggctaatttcgaaaatctgccggttgccggggaatatatgcaccgggatatctacgatattgcggaaaaatacggcaaagacaccttcctgatgattgataagttaggcaccgacaagatgccgttcttctttaatctcaagggacgcaccgatgcgatgctggagaaagtgaaattcttccgtccgcattttaccgaccgtgcaatgcaaaaattcggtcacctgttccccagccatttaccgccgcgcatgaaaaactggcgcgataaatacgagcatcatctgctgttaaaaatggcgggcgatggcgtcggtgaagccaaatcgtggctagtggattatttcaaacaggccgagggcgatttctttgtctgtacgccggaggaaggcagcaaagcgtttttacaccgtttcgccgctgcgggcgcagcaattcgttatcaggctgtgcattccgatgaagtcgaagacattctggcgctggatatcgctctgcggcgtaacgacaccgaatggtatgagcatttaccgccggagatcgacagccagctggtgcacaagctctattatggccattttatgtgctatgtcttccatcaggattacatcgtgaaaaaaggcgtggatgtgcatgtgttgaaagaacagatgctggaactgctacagcagcgcggcgcgcaataccctgccgagcataacgtcggtcatttgtataaagcaccggaaacgttgcagaagttttatcgcgagaacgatccgaccaacagtatgaatccggggatcggtaaaaccagtaagcggaaaaactggcaggaagtggagtaataattacggatggcagagtatcgccatccgtcattcatttaatcgttctgtgccgtctgccccgccgccgccatttgggcggctttttgttttttatagctcaacgctgctgccggaacaggcatcactttaccggtttcaatccaggtacgcaggcggctggcatcggcaaaatgggtatatttgccaaacgcgtccatcactaccagcgccaccggtttattattgataaccgtgcgcatcgccagacaatggcccgccgcattggtaaaaccggttttggttaactgaatattccagttatcacgatacaccagatggttagtattgcggaacggcagcgtatacgtcgggttagagaaggttgccatatcttcccgggtagtacttaactgcccgatcaacggatattgtttgctggcaatgagtagtttggttaagtcacgggcggttgaaacgttatgcaccgacaatccagttggttcaacaaagcgcgtgttgttcattccgagcgatttcgctttcgcattcatcgccttaataaaggctttgtaaccaccgggataatggtgcgcaaggcttgccgccgcgcggttttctgaagacatcagcgccagcaacagcatatctttacggctgatttcgctgttcagtcgtacgcgcgaatagacccctttcatctccggcgtctggctgatatccacttttagtttttcatccagcggcagtcgtgcatccagcacaaccatcgcggtcattaatttgctgatagacgcaatcggacgcaccagatccgggtggttcgaatagatcactttgttggtattcagatcaacaatcatcgcgctaccggaggcaatttccggttgtgacgcggtggtagcggctgccgttttcgcaacggcctgcggtgcaaaaggcacagccagcatcagggccaggctaaataaagaaactcgaaatttcggcatgatgagcattcagatagtggttcacgcgcacgggttgcgcaccgccggagtaaggatttactgaggctagcgacgccatcataacgagcaaaaagtgcgatcgtcaaagaagaatcgtgaggaaatgctgcattgctgacatttacgccagcaatgcagcgcaaaagaactttctagaacaaacgataaccgtagccccatagtataacggtaagggcgagcagcacttccagcaccagcacgcctatcgccagtgtcgaactggagaagctaagtccttcctctttgttgatattcaggaagctcggaataccgagatacagcaggtagccggtgtaaaacagcgccaccgtgccgaccagcgcacacaaccagaccagcgggtaaagcgccaccagaccgcttaaaaacagcggagttgcaacgtagcccgcgaagaccatgcagtgcgcaagtgacggacgctgcggataattacgcgccatccaccagatgacccgccccatcaccgcaaccccagccagcataacgccgtaaaacaagacagccagcgccagtccggtaaaccaggataacttcaggatagtgccatcgccaaaattccagccaatctgtgtagtgccaatgaaggcgcaaatcaccggaatcgccgccatcagcaaaacgtggtgggtgtagtgatgagaaatcgtttcgttttcgcgattaatcacctgcatttcacgatcgggatgggaaaacagtccccagacatggctcataccgcccccttgttgtgagttcatgaacctgacagttcaagtataagtcagcttgtgattattttttgttcgctcatgtaatttgcaccgtctgatgtacgtcctttttcagcgtgaatgattcacagggtgtatgcttacagtcaagcaaagggagacagactgtcctatggatctcaatacactcatctcacaatatggttatgccgcgctggtgatcggtagcctggcggaaggtgaaaccgtgactttgctgggaggcgttgcggcacatcaggggctattaaagttcccgctggtggtactttctgtggcgcttggcggcatgattggcgaccaggtgctttatctgtgcgggcggcgctttggcggcaagctgttacgccgtttctcgaaacatcaggataaaattgagcgggcgcagaaacttatccaacgccatccgtatctgtttgtcattggtacgcgttttatgtatggctttcgggtgattggcccgacgctgattggtgccagccagctgccgccgaaaatctttctgccgctgaatattctcggcgcatttgcctgggcgctgatttttaccactatcggttacgctggtgggcaggtgattgcgccgtggttgcacaatctcgaccagcatttgaagcactgggtctggttgattctggtcgtggttctggtggtaggcgtgcgctggtggctgaaacggagcgggaagaaaaagccggatcatcaggcgtaaaactattgccctggataaggtgttcgcgccgcatccgacatccggtgcaccatgcctgatgcgacgctggcgtgtcttttctggcctaacccaatgaaataaccacgcacctcactgcgctattctgggttgaactgcggattcgccaacataaagccgccatccactatcaacgactgcccggtggtgtaatttgcgccctccgaacaaagccataccaccaggctggcaatctcatgcgttgtgccaaaacgtcgcaagggaatcgaaggctccgcgtcaggcttcacgtcgccgccatccatgccgttcattggcgtggcgatcgccccaggtgcgactgcgttcaccaaaattttatgcctgaccaactccagcgccattgctttggttaacccgccgagcgcatgtttagcggctgtgtaggcgctggcatccggcagcggcgtatgttcatgtaccgatgtaatgttgatgatgcgaccgccctgcccttgcttcaccatctggcgggcagcaatttgcgagcataaaaatgcaccatcgacatcaacggtaaaaatcttgcgccactaatcgaaagccatatcaagaaacggcgctttggtcattgcgcccgcattattcaccagcacatcaatacgccccagccgttgaataagtttctccagcgcctgcgcaccttctggtagattgccgagatccagttgcacgatctccgcacgtacgccgtggctaactacctcacgcgcggtatcttttgccccttcttcatctgagtgccaggtaatgccaatatcaaacccctgctgcgccagcaataacgcgcactctttgccgatccccgaatcggaggcggtaattatcgcgacctgtgccatcgagttctccacttaacgctcaacaaacgttaagtatagaaggcgcatatcatcagcgtttgtaccccccgcccagcgcaccagtgagttgaatggaggcatccagccactgcccttgcaataacaggccattggcccgctcacgcagcgccgggattctggcttcgctgacccgggaaccagcaatgaggcccgcgttaaagcgggcctgcgcaagacctactacacgcaaggcatcgcgctcaatttgcgcctgatgctggtttttctccgccagtgtctgaacctgactggctgcccgcgccacgtcattcaccgcttcaaccaccgctttgttgtagctggcgatagacaagttgctttcggcttttgcgatatcgaggttggcgttaagacgaccactatcgaaaatgggtagcgtcaggcctgccgtaacgcccatttgctgcgcggaatgacggaacagatcgcttaagtgcaacgcatcctgttgcaggaaggccatcaggttgatgtcaggataaaatgccgcttttgccgcatcaatagtgcttaacgatgactcaacgtaccagtgcgccgcctgcaaatctgcccgccgcgccagtaaggagtaccccagttcatcaggaagctggcttgccactttcggcaacgcgaccgttttaagcttcagtgactttgtctggtgatttgtgagtgcatttaaccgtgcctcaataattttcattttacccgcgacatcgttgagctgctgccgggttttgctggcattaatatcggtttccacaccttcaactgaagaagtaatcccgttctgatatagctggcgatcggtcgcgataatggtgttctgctctttttcgatttgctgcaagaccgtgtttaacgccgcctgggtttgccactcccagtacaggcgggctacgctgccagccagcaattggcgggtttgctcgcgttccgccgcccgtgctttaaccgtacccaggcgagcagtaatctccgcccgattctttccccagatatcgagatgccagcccgccgttaagccaaaagtaccgttggtgtaccacggaccggtcgtacctgcggccggatcgttcaaagcaaacggccccattaacccttctgccgacattttttgccgctccatatccgcagaaaagtcgagctgcggaccatcctgagtggcaactgccttcgcctgggcttcagccagctgaatgcgctgttcagccacctgcatatccggtgcgctctgtagtgcgttattaattaaggaagtgagttgattatcgtgatactccagccaccattggctgtctggccaaccatttttcagcgccgtgggtaatgcggtgtcaacttgtgccgcgggtgtttgctggcttaacgcctggcgggtttcatgcataggcgcacacccggccagcatcagtaacagcggaaaacaggcgatggctggataaaaagaatcacgattcatgggggaataatcaggtaagaaaaggtgcgcggagattaccgtgtgttgcgatatattttttagtttcgcgtggcaatacatcagtggcaataaaacgacatatccagaaaaatatacactaagcgaatgatatctcccgatttatcttaatcgtttatgaatagcggcaaagggcttcgttttttcctatacttattcagcactcacaaataaaggaacgccaatgaaaattatactctgggctgtattgattattttcctgattgggctactggtggtgactggcgtatttaagatgatattttaaaaatcagatatggcatataagttgtcaggtcagtaactcgatattttgtgtacttgatttgcaaacagctccggtgttggtggcgtcaaaatcgctgaagcgttccccgaaggccggggcagcccacatggatgtgggctgagggcgcgtcttacaaggacgttacctcgcgcccgacccggtagccgaaggggataagctgaaggtaccgcgcagcggcgattttgttcgccagagcccggggtgcagggggaggaggcgattgtcctccccctgcgcgctccttgcgccagtggcaatatgtggcttagctcatgaaaggagcgcaacaagatgatgaagctgaataagcgattcattgtctcagataagctgcgattccactattatcgcagcttatcgatatcaatggcctgaatagcccttgcaatatcaggggaattattcaacacccgaacatgctgaaataattccgttgcttcatcgtattctttacgcaaataactcaaccactgtttaatccgcgcaacgtgatataacccggtatcgccctgcttttccagacgggtatatttttgcagcaaagcaaccacctccggccacggcattcgcggttcgttatatttcaccacacggctcaggttgggaatattgagcgccccgcgaccaatcatcactgcgtcgcagccgctgatcgccatgcattgttgcgcactctgccagtcccagatttcaccgttggcaatcaccggaatattaagccgctggcgaatctcgccaatcgcctgccagtcaatatgttccgcgcggtaaccctgctcttttgtccgcccatgtactaccagctccgtagcgccagcctgttgcaccgcatcggcgatttcaaatttcttctcaccgctgtcccagcccagacgcacttttacgctgacaggcaaatgcgccggtacagcttcgcgcatcgcttttgcaccctggtagatgagttcaggatctttcagtaacgttgccccaccaccgctaccgttaaccgttttcgacgggcagccgcagttaagatccacgccccaggagcctaactccaccgcacgggcggcgttctctgccagccactgtgggaactgccctaacaactgcacgcgcaccagcgtaccggatggtgtccggctggcattttgtagctcagggcaaatgcgatgaaagacttttactggcagcagttgatccaccacgcggacaaactcggtgatgcacagatcgtagtcgttaacttcggtcagtaattcccgcaccaaagagtcaagtacaccctccatcggagccagtaacacacgcatatcatcacccgcaaaaaaatgaggcgctatgttagcgcctccggtcaacggattaaaggtctgcaaagagggattgctgcaaactgcaatccctctctatgcttgatgtatgcctgagttcgctgcgcattgcgtaataccggggagcgaaaaaataagcgctgatttcttaatgtgatcggtagcacgttttacgaattaattgtatgatgaatccatctcatctggggtgttgattatgagtaagacactgaacattatctggcaatatttacgcgctttcgtcctgatttatgcctgcctgtatgcaggcattttcattgcttccctgctaccggtaaccattccgggcagcatcatcgggatgctgatcctgtttgtcctgctggccttgcaaattcttccggcgaaatgggtcaatccggggtgctacgtactgattcgctatatggcgctattgtttgtgccgattggtgtaggcgtcatgcaatattttgatttgctccgcgcacagtttggtccggtagtggtttcctgtgcagtcagtacgctggtggtttttctggtggtgagctggagttcacaactggtgcacggtgaacgtaaagtcgtaggtcagaaaggatcagaagaatgatggcgaatatctggtggtcattaccgctgacgttgattgtcttttttgccgcccgcaaactggcggcacggtataagtttcccctgcttaacccgttgctggtagcaatggtggtgatcattccttttttaatgctgactggcatctcttacgacagctactttaaaggtagcgaagtgctaaacgatctgctgcaaccggcggtcgtcgcactggcctatcctttatatgagcagctacaccagatccgcgcgcgctggaaatcgatcatcaccatctgttttatcggcagcgtggttgcgatggtgacggggacttctgtggcattgttgatgggcgcttcaccggaaatcgccgcgtcaatcctgccgaaatcagtcaccacgcctattgcaatggcagttggcggcagtattggcggtattccggcaatcagcgcagtttgcgtgattttcgtcggcatcctcggcgctgtgtttggccatacattgcttaatgcgatgcgtattcataccaaagctgcgcgcggtctggcaatggggacagcctcgcacgccctcggtacggcgcgctgcgccgagctggattatcaggaaggtgcatttagttcgctggcgctggtgttatgcgggattattacttcgctgatcgcaccgttccttttcccgattattctggcagtaatgggctaaaatttgcgatgcgtcgcgcatttttgatgtaagtttcacgcgttgcataattaatgagatttagatcacatataaagccataacgggttcgtaaactgttatcccattacatgattatgaggcaacgccatgcatccacgttttcaaaccgcttttgcccaacttgcggataacttgcaatctgcactggaacctattctggcagacaagtacttccccgctttgttgaccggggagcaagtctcatcgctgaagagcgcaacggggctggacgaagacgcgctggcattcgcactacttccgctggcggcggcctgtgcgcgtacgccattgtcgaattttaatgttggcgcaattgcgcgcggtgtgagcggaacctggtatttcggtgccaatatggaatttattggtgcgacaatgcagcaaaccgttcatgccgaacaaagcgcgatcagccacgcctggctgagtggtgaaaaagcgcttgcagccatcaccgttaactacacgccttgtggtcactgccgtcagtttatgaatgaactgaacagcggtctggatctgcgtattcatcttccgggacgcgaggcacacgcgctgcgtgactatctaccggatgcctttgggccgaaagatctggagattaaaacgctgctgatggacgagcaggatcacggctatgcgctgactggtgatgcgctttctcaggcggcgattgcggcggcaaaccgttcgcacatgccttacagtaagtcgccaagcggtgtcgcgctggaatgtaaagacggtcgtattttcagcggcagctacgctgaaaacgccgcattcaacccgactctgccgccgttgcagggggcgttaattctgttgaatctcaagggttatgattacccggatatccagcgcgcggttctggcagaaaaagccgatgcgccgttgattcagtgggatgccacctccgcaacgctgaaagctctcggctgtcacaatatcgaccgcgtgcttctcgcttaagcctggtgccggatgcggcgtgaacgccttgtccggcttgccagccctttcctggtgtcgaaaatcccggcaaacagtttgccgtttcttgcgcaaaaccagcgggtaaagtagcctgatggaaattttccttagatcgagtctcctgcatgttaaagcgcgtgttcctcagcctgttagtcctgatcggcttgctgctgttgactgtgctcggcctcgatcgctggatgagctggaaaaccgcgccttatatctacgacgaattgcaggatctcccctaccgccaggtcggtgtggtgctcggcacagcaaaatattatcggactggcgtaattaatcagtattatcgctaccgcattcaaggagcgattaatgcctataacagcggtaaggtaaattatctattactgagcggcgataacgcattgcaaagttataatgagccgatgaccatgcgcaaagatttaatcgcagccggtgtcgacccatcagatattgttctcgattacgcaggctttcgtacgctggattccatcgtacgtacacgcaaagttttcgatactaatgatttcattattatcacccaacgtttccactgtgagcgggcattatttattgcgctgcatatggggattcaggctcagtgttatgccgtaccgtcaccgaaagatatgctgtcagtacgtattcgcgaatttgccgcccgtttcggtgcgctggctgacctttatatttttaaacgtgaaccgcgttttttagggccgctggtccctattccggctatgcaccaggtgccggaagatgcgcaggggtatcccgccgtcacacccgaacagttacttgaattacaaaagaaacaaggaaagtagttatggatgtacagcagttttttgtcgttgccgtttttttccttatcccgatattttgtttccgcgaagcatggaaaggctggcgcgcaggcgcgattgataaacgggttaaaaatgcaccggaaccggtgtatgtctggcgagcgaaaaatcccggactcttcttcgcttatatggtggcatatatcggcttcggaattttatctatcggcatgattgtttatcttattttctatcgttaatattttcccttttctgttaattattgagaataattattacttcactcaataagctgcggatatcacattctgaaccgcagctatttgtgaatcctttcacagtttaaatttccccacgcgcatagccttaatatcagcacgcaatatttatttagcgttcgccttaattactcatagcattaaggaagatcacatgccgcaacaaaattatctggatgaactcactccggcttttacgcctttactggcgattaaagaagcctctcgctgtttattatgtcatgacgctccctgtagtcaggcttgcccggcacagaccgatccggggaaatttattcgctcaatctactttcgtaattttaaaggcgctgccgagacaattcgcgaaaataatgccctcggtgccgtttgtgccagagtgtgcccgacggagaaattatgccaaagcggttgtacacgtgccggtgttgatgctcccattgatatcggtcgtttacagcgttttgttactgattttgaacaacaaactgggatggaaatttatcagcccggtactaaaacgctcggcaaagtcgccattattggcgcaggtcctgccggattgcaggccagtgtgacgctgacaaaccagggttatgacgtcacgatccatgagaaagaagcacaacccggtggctggttgcgtaacggcattccgcaattccggttaccgcaatcggtgctggatgcagaaatcgcccgtatagaaaaaatgggcgtgaccattaagtgcaataacgaaatcggtaaaacacttaccctggagcagctgaaagcggaaaaccgcgcggtactggtcaccgtagggttatcgagcggttccgggttatcgctgtttgagcatagcgacgttgagattgccgtcgacttcctgcaacgtgcacgacaggcgcaaggcgatatcagcattccacaaagcgcattaattatcggcggcggtgatgtcgcgatggacgtagccagcacgctgaaagttctcggctgtcaggcggtaacctgcgtagcgcgtgaagagttagatgagtttccggcaagcgaaaaagagtttaccagcgccagagagctgggcgtttcgatcatcgatggatttacaccagtagccgtggaaggcaataaagtcacctttaagcatgttcgtttaccaggtgaactaacgatagcggcggacaaaattattctcgctgtaggtcaacatgccgaacttgctgttttttccgcactggaaccgcagcgtaacaccatcgaaacgcaacattaccagacccgcgacccgcaagtctttgctgctggcgatattgttgagggtgacaaaaccgtggtctatgcagtgaaaaccgggaaagaagccgccggggcgattcatcactatttagagggagcttgctcatgttaacgaaagatctttcgattactttttgcggcgtgaagtttcccaacccgttctgcctttcttcttcgccggtaggcaactgctatgagatgtgcgccaaagcctacgacacaggttggggcggcgtggtgtttaaaacgatcggtttttttatcgccaacgaagtctcgccgcgttttgatcatctggtgaaagaagataccggttttatcggcttcaaaaatatggagcagattgctgaacatccgttggaagagaatctggccgccctgcgtcggctgaaagaagattatccggacaaagtattgatcgcttcaatcatgggcgaaaatgagcagcaatgggaagagctggcgcgtctggtgcaagaagctggcgcggatatgatcgagtgtaacttctcctgtccgcaaatgacttctcatgcgatgggtagcgatgtcgggcaaagcccggagctggtagaaaaatattgtcgggcagtaaaacgtggttccacgctgccaatgctggcgaagatgacgccgaatattggtgatatgtgcgaagtggcgctggcggcgaagcgcggcggcgcagatggcattgcggcgattaacaccgttaaatccatcaccaatatcgatcttaatcagaaaattggtatgccgatcgttaacggtaaatcgagtatttccggatattccggtaaagcggtaaaaccgatcgccctacgctttattcagcaaatgcgcacccatccagaactgcgcgatttcccgatcagcggtatcggcggcattgaaacctgggaagatgcggcggagtttttattgctcggcgcagcgacgttgcaggtgaccaccggcattatgcagtacgggtatcggatagtggaagatatggcaagcgggttgtcgcattatctcgccgatcaagggtttgattcgttgcaggagatggtaggtctggcgaatcacaatattgtcccggcggaagatttagaccgcagttatattgtctatccccatatcaatcttgataaatgtgttggctgtggacgctgttatatttcctgttacgacggcggtcaccaggcgatggaatggagcgagaaaacccgcacaccgcattgtaataccgagaaatgcgtgggttgtctgctttgtggtcatgtctgcccggtaggttgtattgatcttggggaagtgaagtttaagaaaggcgagaaagaacacccggtaacgttgtagaacccgagtcacttccggcatttggttcctgtcgccggatgcggcttgaacgccttatccggcctacaaaaccatacaaatcagtatgttgtgctcattgtaggccggataaaacgcgccagcgttgcatccggcatttggttcctgtcgccggatgcggcgtgaacgccttatccggactacaaaaccacacagatcatgatgttatgtgcgtttatgaacgaatgcggaccacaatcacatcacttcttacgcgcgtatttcagtgaatccagcgccacggcgaagataataatcgcccctttgatgatgtactgccagtacgggtttacgccgatgtacgtcagaccatagttgatgacggtaaaaataatcaccccggtcaccacaccaattaccgtccccacaccgccgctgaacgatacgccgcctaccacgcacgccgcgatagcatccagctcatacataaagccgaggttgttggtggctgagccgatacgtccggcttctaacatcccgccgaaggcatagaacacaccagacaacgcgtaaatcatcagcaggttcaggccgacgttgacaccagatactttcgccgcttccgggttaccgccaatggcaaaaatgttcttaccgaagcgggttttgttccataacacccagacaaacaccaccgcaatcaacgcatagaaggtgatgtaagagagacggaaactccccagcgcaataaagccttgggcaaaagtggagaaaccactgtcaaaaccggaaattggcgatgccccgacaaagtcgtaatagagcgagttaatgccgtagacgataatcatcgtaccgagcgtggtaatgaacggcgtcacgttgagataggcgataatcaagccgttgatcaaaccgatcaccgcaccaatggcacagacaatcagaataaccagcgcaatcggcatcgtcgccatttccgggaacactttgttggcgttatccatggactgcaataacgtcgctgctactactgccgccagccccacctggcgacctgcggaaaggtcagtcccctgggtgacaattaaccctgccacaccaagcgcgataataatacgcaccgatgactgggtgagaatattacttaagttcaacagacttaaaaatgttgggtcctggaaaataataatcgccagcaaaactaaaagaacgacgtaaataccgccctctttcaggtaagtaagaaaacttttcttatttaatgcactcatgggaagcccctaatcttaaaggtgcaaagacgcaagacgcagaatttcgctttgcgttgttgtttttgtatcgacaattccggaaacgagaccattgctcataaccagaatacggtctgttatccctaacaactctggcatttcggaggagataataataatccccttgcctttcttcgccagttcggcaattaactgataaatctcaaacttagccccaacatcaataccgcgcgtcggttcatcgagcattaatatttctggttgcgttaacagccagcgaccaataatcactttttgctgattaccaccggagagcgaaccaatttgcgtccgatgccccggtgtttttacccgcatcgaatcaatcacccactgggtatcgcttttcatccgcgagttatccagtaaaccaactttatttttatagttgcggatattggaaattaacgagttaaagccaatatccagataggcataaattcccgttgagcggcgctcttcagttaccagtgcaaatccgtggtttatggcttcgttggcattatggttattgatctttttgccgtgcaacgtaatggtgccagccgatttctcgcgaataccaaataacgtctcaacaatatcggtacgtttcgctcccaccagaccggctataccgagaatctcccctttatgcagatcaaacgagacatcgcgtatcgacggctggcgcagcgacgtcaggttacgcacttccagaatcacttcgcccggcttgttttctttgtcagggaaacgctggttaagagaacgcccaaccatcatggcgatgatcttgtccatcgtcagtcctgccagcggttcggtagcgatccactgaccgtcgcgcaatacggtaacttcatcacataactggaagatttcttccattttatgcgagatataaacaataccgcagccgcgctcttttaatttacgaataatagtgaacagatgattgacctctttttcggttaacgaagaagtcggttcatccataatcacaattttcgcgttataggaaaacgctttggcgatttcgatcatctgcatttgcgaaacagataatgtaccgacgcgcgcacgcggatcgatatcaatatccagttcatcaaaaatcgctttggtttcgcggtacattttgtcctgatcgacaaacatgcctttggtgggatatcgccccagccacatgttgtccatcaccgaacgttgtaataccaggtttaactcctgatgtaccatcgaaataccattttccagtgcttctttggcggaatggaaatcgatctctttaccctggaataaaatggtgccagagtctttttgataaataccaaacaggcattttaataatgttgattttcccgcaccattttcccccattaatgcatggatagaatgtggtcggacttttaagttaacgttatcaagtgccttaacaccaggaaaagacttgttgataccgctcatttccaacaagtattccccggaagacggagtcgttgagctgaccatataattttaccttgttggccatacaataagggcgcagtaaacgactgcgcccaatcagtcttatttcttgctgaattcagccaggttgtctttatctacgccaacataaggtacgcggactactttgttgtcgattttccagttggtgccatcagccgcacctttgccatcggccaggtttttcgccagatcaaaggtcgctttcgcctggttgttagcatcgttcagtacggtgcccgccagtgcaccggatttcaccagcgccagcgcttctggcagcgcatcgacgccaaacaccggaatgctggacttgttgtgtgctttcagtgcttctaccgcgcccattgccatcgcgtcgttgttggcgataaccacctcgattttgttggcgttcgggccagacagccaggcgtccatcttatctttcgcctgagcggtatcccacatagcggtatctaactgtaactgttcagttttaatgcctttgtcgttcaattctttaatcacgtaagtggtacgtgcttctgcatccggatgccccggctcacctttcagcagtacgaattgaatctgaccgtctttgttcagatcccaaccctgattcgccgcccagtgtttagcaatcaaatcaccctgaataatgccggactctttggagtcagtgccaacgtagtaggctttgtcgtagctatccagcgccttacgagacggttctttgttgaagaaaaccaccggcacgttttgcccacgcgctttctcaatcaccgtacccgcagctgccgggtcaaccaggttgattgccagtgccttcacccctttcgccagcaatacgtcgatctgatcgttctgcttggactggtcattctgagaatcattcatcagcagctgaacatctggcgcggctttcgcatcttgctcaatagccttgcgcactacagacataaagttatcgtcgtacttatagattgttacaccaatgcgagtatcagcagcgtgtgcagcggcaccgaataacatgctggccatcacagcagacagggttaacaccttcttattcatggtatctccggtttttcttatgcagggtagtgcttgagataaatgctcggcggggcagtagagttaatgaagtgttactgaacgccgaagctcactttttaaaattcgttcttccatgcccggtaacgctccagaaaacggctttaattgttgttatgacgctattacctcggtgaaagtgattattcactgttacatacgggttacaacgttaaaacggtgcaatcatagccatcacattgttaagatactgtgaaatcactcacagattgaaagcggttacatcgcctgatttgttgagttagtgatcgccgccgcattctggcgtgttgcgacagaatggcgacgcactaacgtcggcataaaacagtggctggcacgaggatcaatattgtctgctgccccctgcaaggccagttcggtagctaatttagccattgaagcaatgggataacgcacagtcgttaattgcgggtcggtgtaacgggcgatgggaatatcatcgaaaccaatgattgagagatgtaacggaatcgcaatgccattatcttttaatgctgtcagtgcgccagcggccatattgtcgttataagcaaatacagcggttagttgtagattgcgccccagcagttcaaccatcgccgcctcaccgcccggcatgtccggcgtgccagtgccaatccagctttccggcggaataatatcctgctctttcaacgcactcatccagcctgctttacgcatggcgtcatcttcaatgccgtggctggaagaaagataaccaatacgttgatgaccgttattcagcaacatgcgcgtcgccattcgggcaccgctgagattatccaggcaaacgcaacgatgggcgtaccccggcacaacgcggttgattaacaccataccgggaatgttatccataaattgtgccagttcatcgtcactcaatgcttttgagtgaacaatcaacgcattacaacgctggcgaattaacacctcaatggcgtgacgctctttttccgcttcatgatagctattgccgattagcacgtatttctgatgctgctgggcgaccagatccaccgcttttaccagcgcgccgaaaaacgcatcagaaacgtccatcaccaccacgccaatggtatcgctaacctgagttgccagcgcctgggcattggcgtttggccgataatccagctcactcacggctttcattactgcttcacgcgtatcggcactgaccagcgtgctgttattgagcacccgggaaaccgttgccacagagacgccagcctgacgcgctacatcacgaatggtgatcatattcactacctgttatgagattgcagtaaatgactgcttgctggcggctattttgtcagcactgaatacaggacttcgtgaatcgagtcacagcaatggaaacggttacagccgttttgttaacgaatgtgatccagatcgttatcttgatgttttagatattgtcggtccggcagcacgcaaagttaactgacgccagagccattccaccggcccctggcggaagtaacgcagccagataacagagaagaagatattcgccagccataccggaataacaaacgccagcagctccagacggtcaaactgcataaacaaaccgaggtggtaaaaaagcgtagtacaaatcagcgtttgcaatagatagttggtcagtgccatccgtccgacacaggcgattgccagcaccagcttaaagcggcttaattgcggccagaagccataaaacagcgacgcatagccaatcgcctgaaacggcgcactcagttcccgcggcatctgaagtaagaaggcgcaccaacgatacgcccagtccagtcgccattgcagggcgatggcaggaaggttaatgatcaccccaatcgccaccagcacaaaaccagtacgacgatagtgacgaaagctgaactgccctttcagccagccactgcgcatcaatgcggcaccaatgagcatcatccctgccagttgccagccatactgtgcgcccagtgccagtaaactgttgccaacaccatcggcacgattactgatcgcgtcaacaccactgtgaagtttccagtgcttttcatacaaaatagccgatgcatcaggtgtccaggcgcggctggtctggctgtcggaaatcagccccaataacagcaaaacgccaagccccaccagataaagcatgacgcctgtattaaacaggctttttaccgatggcgcatcgcgcaccagccgccagcagattaagcccaccagcccgtaagccagcagaatatcgccgtcccagaacaataaaccgtgaataaagcccagcaagactaacagcgttaaccgcgactggatccatcgtctgccacggggcagcaacatttgcaggcccgcaccaaacagcagagcaaaaagcgtgaggaatttcacctggccgatgagatcgagaaatgcccaggtccatgcatcctgcgacgtaatagcgccgtaccaggcgggattgagataagccgcctttggtagcccaaaggcgctgatgtttaatagcaggatccccagaatggcgacgccgcgaacaaaatcgagcgtgacgttgcgctccatggttcctgccttttaatcagttgtgatgacgcacagcgcgcagaaactcgtggcgcgtattctgactggatttgaacaatccaccaagagaggtcgttgtcgtggcactggttgcatcgcggatgccacgcgccttcacgcagtaatgcaccgcgtcgatagagacagccacgttattggtgcccagcagcgtttgtagcgcaatgagaatttgctgcgtcagacgttcttgtacctgcggacgctgggcaaagaactgcacaatacggttaatttttgacagaccgatgaccgaatctttcgggatataggccaccgtcgctttgccatcgatggtaacaaaatggtgttcacaggtgctggtcagagtgatatcgcgcacggtgaccatttcatcgaccttcattttgttttcaatgagggtgattttcgggaaattggcgtaatccagaccggagaaaatttcatcgacatacattttagcgatgcgatgcggcgtttccatcaaactgtcatcagccaggtcgagattcagcagctgcatgatttcggtcatatgaccagcaataaggcttttgcgcgtttcgttatccatttcatgcacgggcgggcgcagcggtgtttccagtcctcgcgcaactaacgcttcatgaaccagggccgcttctttactgagtgatggcatttatgatttctcctgcaggtgtgacgcctccgccctgcgtgggggcaaagttattaagctgatttacagcctgattattgtgcgtgaggcggcgcacataatccagtattcacagcgataattattgtaattgccgctgcctttcatcagcagatgttaaaacatcgttatgcaaatacggaagtgaaagttactcacagcacattgaataaacggtatgatgaagaaattgcaaacaacacaacaaggagccacgcatggaaatgctcgaagagcaccgctgttttgaaggctggcagcaacgctggcgacacgactccagtaccttaaactgcccgatgacgttcagtatctttctcccaccacctcgtgatcacaccccgccaccagtgctgtactggctttccggattaacctgcaatgacgagaacttcaccaccaaggcgggtgcccagcgcgtggcggcggaactggggattgtactggtgatgccagacaccagcccgcgcggcgaacaggttgccaacgacgatggctacgatttaggccagggcgcggggttttatcttaacgccacgcaaccaccgtgggcgacgcattaccggatgtatgattatctgcgcgatgaattaccggcgctggttcagtcgcaatttaatgtcagcgaccgctgcgctattagcggtcattccatgggtggtcacggtgcgctgattatggcgctgaaaaatccgggtaaatacaccagcgtttccgcctttgcgccaattgtgaatccgtgcagcgtcccgtggggaatcaaagcgtttagcacttatttaggtgaggacaaaaatgcatggctggaatgggacagttgcgcgttgatgtatgccagtaacgcgcaggatgcaatcccgacgcttattgatcagggtgataatgatcagtttcttgctgaccaactgcaacctgcagtactggcagaagccgcgcgccagaaagcgtggccgatgacgctgcgtattcagccgggatatgatcacagttactacttcatcgcctcttttatagaggatcacctgcgcttccatgcgcagtatttactgaagtgaaagtccgcccggttcgccgggcatcttctcatcagaagcgataatccactgccataaagtaacgacgtccgtcttcgttatagctgtagtcgtcacgactgagatccttgtcgccaaggttcagcacgcctgcgcgcagtttgacgtctttagtcacctgccaggccgcgccggtattccagatggtataaccgcccggtgttttagccgtcgcgctgtcggcgcgtttctgcccggtatagtgaccagaaacatagaatgaccagtcttccagcgccagcggtttccagtccagcgtaccgttagcagtatggaacggcagatcggatagcggtttgttttcgccgttgctgacatcacgaccatcgttgtaggtgtagttgatcgacagtttccattcatcgttgaacggaattttcagttcggtttccacgccctgaatacgagctttgttaacgttgtagtagctaaataccggtatgcgccgtccgttagcgcccgtctcaaaaccgacaaagttttggtagcccggtgcagcattgacgtcagacgtacggctaatgctgatacgatctttcacatcgttacggaaaacggtaacgctggattcaaccccttccagccagccttcttcacccatgtagtaaagccccagctcccaactttcgctggtttctggtttcagatccgggctacccacaatcttacatgcgccacggcaggaattgctcgtccagtcagggctaagttgcaacagagaaggggctttaaatgccgtcgcccagccccctttcaccgttacggtgtcggtggcgttataaaccaggtaggcacgcggactccagtgttcaccgtaggtttcgtgatcgtccatacgcacgccggtcgtcagcgccagcggctcgaagatccgccattcatcttccacaaacagcgcgtactggctggcagacgttttggagctggttcccccggtcaggttcaccgcatcgctaagtttgtcgtgacgccattcaccgccaaccgtgagaaactgattaatcgccgtcagcggcaacgtgtatttgccgtcgaccgtattgctttcggaagttatcgggctgctgttgccagggtttttgttctcgactttctcaccgtagtatttcagttcgctggtgccgtaatcccaacgcccattatggctgacggagtagttctggcgttccaggcggtttttgtccagcgagtcggaatcacgatcctgacggtcgaaaccgtatccggcagtaaaatcgtgattttgattcggtgtccaggcaaattcgacattgccgtcgcggctggagaatccttcaatacgcggcgtttctccggtatcggtggtcgttgagttttgcgggtcatccttttcacgttttgccaggctgccgtaagctttcattcccagcacgccgtcaattaatggtccgctggtaaagaattgaccgttataggtatcaccgcgatcgcgatgttcctgaacggtggtatcgacggtaacggtgcccgaccatttctgaccgatttttttggtgatgatattcactacaccgccgagcgcatcggaaccgtacagcgacgacatcgggccacgaaccacttcaatacgttcgatggaatcgaccgggatccagttcagatcgaaatcattgtggcggaagacggcattgcgggagttaacgcgtttaccgtcgacaagaatcagggtgtagctgctgtccagaccacgaatacttacgcccttacggttatccccttcgttcgtcagttgtacgccaggcacttctttgaggacatccttcagattctgtaccggttttcgctgcaggtcttcctgggtaatgacgctgatactggcgggagcatctttaaggttttgttcaacggaagatgcagtgacaaccatcgtttcgccatcatcatcgaccgctaacacaggccatgcacaagaaatagcggacaaacacagcccgacccgtacgaaagggttcaacctaaacattccatatctccatgaggtaactacgaaaataaaatgggtatcgctcacatcttctttacgtccccttgcgtacggcagcatcgcggtggacttatttgtatgcaggtgatcatcccagaaagccggaacagcctctgatttgtcagccttttttgattgcggcgtaacgataatgcaaacgataacaattataaatccaaatgttaaattttatatccgcatgatttgtcagggaaatggaattgaaaaagccctctcggttgagagggcttagcaaggaagggaggaaacttatttcttatcgttctgcgggaacttcatttcgctgtagcgtacgaagtgagttcctttaatcagcttgtagccgaaccaaataatcaggaacagcgggataccaatatacgttgccgctacgccgccccagtcaatggtatctttcaggaacgcttcgtagttctggcccaaagtgataatcagacacagaatgaatgcgaagatcggccccagtgggaagaaaccggaacggtacggcagatcgttaatgtcgtgtccctgcaatacgtacccgcgacggaaacgatagtggctaatggcaatccccagccaggcgataaaacccgtcatcccggaggtgttcagcagccacaggtataccgtctggttgccaaacatggaggtcaggaagcacaaaccggcaatcaccgtcgtcgcatacagcgcattacgcggcacgccaccacgcgacagtttagcgaaaatgcgcggcgctttaccgtcacacgccagggtatacagcatacgagtagacgcatacataccggagttacctgctgacagcaccgccgtcagaataactgcgttcatcaccgccgccgcagagagcagacccgcgtgctggaacaccagggtgaacggactgacgctgatgtctttaacatcgttacgcagcaggctcggatcggtatacggaataatcaggctgataatcaggatcgcgaacacatagaacaacaggattcgccagaatacctgacgtaccgcgcgtggaatgtttttcgccggatcttcggactcgcctgcagcaataccgatcagctcggttccctggaaagagaagccgacaatcatagctacgccgatcatcgccgcaaaaccaccagcaaacggcgcttcgccgattgtccagttgctccagcctgcaggctgcgcgcctttgaagataccgataatcatcagcacgccaacgatgataaagacaataactgtcgtgactttgatcagtgagaaccagtattccgcttcaccaaagccgcgaacagagatgtagttcaacaggaagataacgccgaggaacaacgcactccagatccagcccggtgtatccgggaaccaccagctcatgaccagctgtgctgcaaccaggtcaacggcaatagtcaccgcccagttgtaccagtagttccagcccagcgcgaagccaaagccttcttcaacatagttctgaccgtaagtggcaaacgaaccggaaaccggcatatatgcagccagttcaccgagactggtcatcaggaagtaaaccatcaggccaatcagcatatacgagagcaatgccccgcccggacctgcctgagaaatcgttgcgccagaggcaacaaaaagacctgtaccgatggaaccgccaatggcaatcatcgtcaggtgacgcgcctttaattcacggcgtaagcccggcgcttctgtagttttagtttcggaacccatacaaaaatgctatccatcttaaaaatgaggcgcgattgtagcagacgattggcaatccttccggcagaaatacacggttataagacaccttcatgatcgcccagggattataagtaaagcagccaatctcttttctggcgaatgcatgctgagggcgctgcgtcacgaaatcgacacagcaccagcatgttcttgtacagcaccttaacgcggtacattcgcgggatcgcaatagtccagaaagcgccgtagcgcgttggaaaggtgtttttgccgatgatgtatacgccacaacgtacgcatcaggcgcggcagagggaccgcaacttcacttaatgtgcctgcctgcaattgatcttcaatcacccgtcgcgacaggcaactaattcccaacccatgacgcaccgcatgtttgattgcctcggagttacctaattccatcgccatctcaaacttcggtaaatgtgacagcaacagataatcgacaatctcccgcgtgccggaaccgcgttcacgcaggatccacggcgcagcggccagctgttctaaggtgaccggaccacgagccaacggcgaagtcggcgcggcgaaaaccaccagctcgtcttccagccacggttcagaaatgatttcagtgctgtggcacggtccttcaataaagccaatatcaacgcggaaatccagcaccgcttgcatcacgtcctggctattcccaacgctaagttcaatcggcaactgcggataatcatggcgataacgggcgataactgcaggcagaatgtagttaccgatggtactactggcatagatacgaatcgcaccgttgtcttcgcgaaacagttgttcgatttcaaccgcctgttcaagcagtgccaacgctcgcggatagagcagccgcccgtgttcattaacaaccagtcttttccccacgcgatcaaacagttgaacgccaagctgcccttccaggtcggtcaaggctgcgctcactgctgattgcgacaacgccagcatcaccgacgcctgggtggttgatccacttttcaatacttctgcaaaaacttccaactgccggagggtgatgtgcatagtcgcttaccacttataaagattaattataaatatataatcaattttatttttaaaccagttagtcgtaaccttatgcccggttaaaggagagggttatgacgaatatcaccttacagaaacaacatcgtacactgtggcattttattccggggttagccctgagtgcagttatcaccggggtcgccctgtggggtggttccattcccgcggttgcgggtgccgggtttagtgccctcaccctcgcaatcttgttggggatggttttaggcaacaccatttacccgcacatctggaaaagctgtgacggtggtgtgctgtttgccaagcaatatttattacgtctgggtatcattctttatggcttccgtctgacgttctcgcaaattgccgatgtcggtatcagtgggatcatcattgacgtgttgacgctgtccagtaccttcctgctggcttgcttcctggggcagaaagtgtttggtctggataagcacaccagctggttgatcggtgccggtagcagtatctgtggtgctgccgcggtactggcgactgagccggtagtgaaagcagaagccagtaaagtaaccgtggctgttgcaaccgttgttatcttcgggaccgtcgcgattttcctctacccggcgatatatccgctgatgtctcaatggtttagtccggaaactttcggtatctacattggttctactgtgcacgaagtggcgcaggtggtggcggcaggtcatgccatcagcccggatgcagaaaacgcagcagttatttccaaaatgctgcgcgtgatgatgctggctccgttcctcatcctgctggcggcgcgtgttaaacagctgtctgggacgaacagcggcgagaaaagcaaaatcactattccgtggtttgccatcttgttcatcgtcgttgccatctttaactcgttccacctgttaccgcagagcgtggtgaacatgctggtaacgctggataccttcctgctggcaatggcgatggcggcgctgggtctgaccactcacgtcagcgcgctgaaaaaagccggggcgaaacctctgctgatggcactggtactgtttgcctggctgattgttggtggtggtgcgattaactatgtgattcaaagcgtcatcgcataaaccactacatcttgctcctgttaacccgctatcattaccgttttcctccagcgggtttaacaggagtcctcgcatgaaatacattggagcgcacgttagtgctgctggcggtctggcaaatgccgcaattcgcgccgccgaaatcgacgcaaccgcgtttgccttgttcaccaaaaaccaacgtcagtggcgtgccgcaccgctcacgacgcaaaccatcgatgaattcaaagccgcctgtgaaaaatatcactacacatcggcgcaaattcttccccacgacagttatctgattaacctcggacatccggttgctgaagctctggaaaaatcgcgcgatgcctttatagatgaaatgcagcgttgcgaacagctggggctttctttgctcaacttccaccctggcagccatctgatgcagatttcagaagaggattgccttgcgcgtattgccgaatccatcaacattgcgctggataaaactcaaggtgtcaccgcggtgattgaaaacaccgccggtcagggcagtaacttagggtttaaattcgaacatctcgcagcgattatcgacggcgtggaagataaatcccgcgtcggcgtctgcattgatacctgccatgctttcgctgccgggtatgatttgcgtactcctgccgaatgcgagaaaacgttcgctgattttgcccgtattgtaggctttaagtatctgcgcgggatgcacctcaacgatgcgaaaagcacctttggcagccgcgttgaccgtcatcatagcctcggcgaaggcaatatcggtcatgatgcgttccgctggatcatgcaagacgaccgtttcgacggcattccgctgatccttgaaaccatcaacccggatatctgggcagaagagatcgcctggctgaaagcgcaacaaactgaaaaagcggtggcctgatcgatgaacgacagggaaaagcagattcttaaaattttacggcgtaacccgctgattcaacagaatgaaatcgccgatattctgcaaatcagccgctcacgtgttgccgctcatattatggatttgatgcgcaagggtttgattaaaggcaaaggatatatccttaccgagcaggattactgtgtggttgtgggtgcaatcaatatggatattcgcggaatggcggatatccgttacccgcaagcagcctctcatccaggttctgttcactgttccgcaggcggcgtcggacgtaatatcgcgcataacctggctctgcttggtcgggatgtgcatttaatttcagctattggcaacgatttttacggcgagacattactggaagaaacgcgccgcgcgggcgtgaacgtttcaaactgcattcgtctgcatggacacagcactgcaacttatctcgctatcgctaataagcaggaagaaactatcctggcaatcaatgacacacatattctgcaacagctaacgcctcaactgctcaatacttcacgggacttgattcgccatgctggtgtggtgctggctgattgtaatctcacacctgaagccctggagtgggtctttaccattgctgatgaaattccgatgtttgtcgataccgtttccgaatttaaagcgaacaaagtaaaaaactggtacagccggatccacactctgaaaccgacacaaaatgaactggaaattttgtgggggcaaccgattaaagacgacaacgatcgcatcagagctgtaaattcgctgcatcaacaaggtgttaaacgcatttttgtttatctgaaagatgaatctgtattttgcagcgataaggatggagaacaatttttgctgaccgcgccagcgcatacgacagtagacagttttggtgctgacgatggttttatggcgggcctggtatatagctttcttgaaggatacagtttccgcgacagcgcccgttttgcgatagcctgcgcggcaatttcacgcgccagcggcagcttaaacaaccctaccctgtctgccgataacgcgctttcattagtgccaatggtgtaacaatgttgccggattcgacgcttgaccgcatcttatccggctcataaattgcgcactacgctaaaccaataaagaatcctgcaatagtagcactcatcaggttactgacagcaaaaacgcaatagccagtaataccaccattcccagaacacttctcatgacatccatagttattatctcttcatgtcattttgggcgacggctctctgcccatcataaatagccgggcctgcatcttgcgatactgacccggcttgttatcaacacttaatgggtttttatgtagccgcgtacgcactcttcgactaatccccagaaccagtcggtatcaatagtgatgccgactttggtattggcgggcttgccaagaacacccagctcgtcgcagacggtacgcccatagcaagggccactgttaacgtccacttcgacgtacatctcctgggttttaatgccatcagggttaatcaaataaccgatgcaggtggcgtcgtgcaccgggccgccagccaggccgtagttttcgaactgcgttttgagagtgaagttcatgatgtcgctgaacagctctccggcagggccgccagccctttccatccgagcaatcacgtccggggtgcaaacggtctggttggtaagatcgaggcccatcatcactaatggaacgccggaggtgaacaccacgcgtgcggcctccgggtcagcaaagatgttgaactcagcagatggggtgaagttgccagtaccataagcaccgcccatcagaacaatttcacggattttcggcaggatcgcgggttgcatacgcattgccaccgcgatgtttgacaacggaccaaccggcaccagagtgatatcgccatcgcttgccataagggtatcgatgatatatttcaccgcatgagtgttttctgcctggcgggtcagcggctcgaataccgggccatccagtccggtttcaccgtgaatattatcggcaacaatttgttgacgcataatgggctgcggcatccccgcataaaccggaacattaatctccagtttctggcaaacattcaggccattaattaatgttttatcgagggtttgattacccgctacaatggtgatacctaataaatcaatcgccggatgtttcgccgccatcattatagcaatagcatcatcatgacccggatcacaatccagaataatttttctcttttccattgtttatttcctctgtttccagttgcgttattgtttctacagcaaagaaaattcgacctggccgatgattgaatcttaacaacagcgtacgtatgctaaatatgagaaatctcatagcggataaacatcgtgaaagaaatccacaataatgatcttaagcagcaattgatgagtgaatctgcgtttaaggattgcttttcaacggatgtttcagccgatacgcggctgtttcattttttagcgcgtgactacattgtgcaggaagggcaacagccgtcctggctgttttacctgacgcgaggccgcgccaggctttacgtcacgcttgctaatggtcgcgtgtcgctgatcgatttctttgccgcgccctgttttattggcgagattgagttaatcgacaaagaccatgaaccgcgtgcagtgcaggctattgaagagtgttggtgccttgcgctccctatgaagcattaccgcccgttgttattaaacgacacgctatttttacgaaaactctgcgtcaccttaagtcataaaaattatcgtaatattgtttctttaactcagaatcaatcatttccgttagtgaatcgcctggcagcttttatattactctcgcaggaaggtgatctttatcacgaaaagcatacgcaagcggcagagtatttaggcgtttcttatcgacatcttttatatgttcttgcgcaattcattaatgacggtttattaattaaaagcaagaaagggtatctcattaaaaacagaaagcagttgtcaggactggcgctggagatggacccggagaataaattctccgggatgatgcagtaaaaattattggcaatagtgcgattgccggatgcaacgcttaataaggcgtacatccggcaatgaaactcaagctaaaccaataaagaacccggcaatggtcgcgctcatcaggttggaaagcgtcgccgccgccagcgcccgtaaaccaagctgggcgatttccggcgcgcgttttggcgaaatagccgaaaacgctccaacgacaacaccgatagaaccaaagtttgcaaacccacagagggcgaacgagataatggcaatggtcttgacatccagcgtgccgctcgtttgcagatagggcgagaaattgagataagcaacaaactcattaatcgccagtttctgcccaatcaaacttccggcaagatttgcatcactccagtccacccccataatccatgccaacggggccagcacatagccgaaaatgctttccagagagacattggcaaaaccaaaccagccgccaactccaccaataatgccgttgatcagcgcaataattgcgacaaacgccattaccaccgtcgccacaccggcggcgattttcagcccagtcattgcaccgttcgccgcagcttcaataatgctttttggcggtgtttcgctaaacgacagattttcaaacgtaacttgcgaaggttccgtcgccggactaagaatacgtgcaaacaggataccgccaggaatagccatcagcgaagcggctaacaaatagtcaatcggcacgcccattccggcatagccaatcatcatcgaacccgcaatagacgccatgccgctacaaatagccgtaaatagctcgttgcgattcatgcgatcaataaaaggtttaacgatcgccgggatctcattttgcccgaggaaaatagtggtgactgcgacaaaagattcgattttgctgatgttgagggctttctgaaaaatactgccaagaatacgaatcagcagccccattacgccaatgtagtacagcaagctgataagcgcggtaacgaaaataatcgccgggagtacgcgaaaggcgaagataaagcccgcaccgtcaaacagaacatccattttgggaccgaccagcgaaccaaaaataaaggcacttcctgcgtcactgtaggacatcactttatggacgcctaatgccgcctgctctactgcccattttcccgggggaaaatagagcatgatgccaccaatggcaatttgcagcagcagcgcagccccaaccgtgcgcaagctgatgctctttttatttaccgacaacacaaaggcaattgccagcaataccaccatccccacaacacttctcattatatccataatgattttcccttcatgccagtaaacccggcgtcagcgccaggttttggtatgtttgatgagtacgggcgacggctttctgcccaccagaaattaacccacgagacgctgatattctttggcaatttcgctcgccagaatggcgttattaaagaccagttgaatattggatttcaggctatcaccgccggttagctccgcaacacgcgccagcaggaacggtgtactctctttcccaataacaccctgttcttcggcttcagcaacggcttgatcaattgctgcattgatggtttcttctggcatcgcaaactgttccgggatcgggttcgctaccaccaggccgccgttcaaaccggtttgccacttcactgccatcgcgcgagcaatttcgcgggcactgtcgagacgaatgctgacttcaaatgggctggttcggcagaaaaacgcaggcagcgcttttgtctgataaccaattaacggtacaccgaaggtttctaaatattctgttgttaatcctaaatcgagaatagattttgcccccgcacaaacaacagtgacattggtatttgccagttcctgtaaatcggcagaaatatcgaaggtatgttccgctccgcgatgcacaccaccaatacctccggttgcaaaaactttaatcccagccagtgctgcaataatcatggttgatgcaacggtagtcgcgccatttttccctgcagcaacgacaaaaggtaaatcacgacgactaactttcgtcacgttatgtccttcacggcccagcaattcgatttcttctttacttaagcccactttcatcacaccgccaataatggcgatagtggctggtactgcgccctgtttacgaattgtttcttctacttcaattgcggtttgggcattttgtgggaatggcattccgtgagaaattatggtcgattccagcgcaacaaccggttttttattttttaaagcatcctgtacttcagcggatatttgtaataattcaggggacagagttaattcagacattctgtgttctccactaacgatgtaacattggcaattgataattcagggttgttggtatattcacaggcaagtgccattgacgaacatccctgcgcaaatcgaacagaatcgataaacggcataccgtctacccaacaggaggccagccccgccatcatggcgtcgcctgccccagtaacattgatgacattcgttttaataggggccgaccacccactttcaccgttgatatcactgtagtaaacgccatcccctcccatgctaagcaccaggcggttcaggccgtgttgatgaaaccaggcggcgacctttgcgacatcttcacgtccggaaagtgcaattccgctcaacgtttcggcttcaagacggttaggttttaacgtatggattttgctcagatgatcgcggattttgacgcatttccatgccgataccggatcaataaatacaggcgtttccccgctattttccagaacccagaccagcgcctcttcactaaggttgcaatccgcgacaataacctttgcaccgcgaataaactcctgatgctgggcaagaaattctgcagaaatacagtcactaatactcatatcatttatcgcgacaagcatttctcctgtattatcgagcagtgataaatagctggatgtattctcacccggaacaattaagcatttatcgacataaacaccggattgattagtttgcgccagtaatgattgcccataaaaatcaccacctactgcacttaaaagccaggcatttttccccagtaacgccagattatgagcgatattccttcccacgccacctggggtaaatttaatttttccgggattcgaatccgcataattcaatggatgatgtgaatacccagccacatcaatattcgccgagccaataattactatgtagtccttttcgcgcatagcacgccccctggcaataaattgccaacgaagaaattgggtaaaatagtcattacagtcaataagactattagagcacgtgttcagatttaaacacatgttcataataagcatgtttaacgcaatgtaaatcgatcagaaaaaacgaaatcggccagatatgaaggcggtcacaaaatttgtctatttatgcagcaacaaaagagaaagttgtgatgtgtaacacacaatatggcaggcaagaaaaagggcagagatgtttctgccctcagattgttgacaatgcgcgctttgttcatgctggatgtggcgtaaacgccttatccgacctacaaaagcgcaaaaattcaatatattgcagggttcatgtaggtctgataagcatagcgcatcaggcaattttgcgtttgtcatcatcggggcagagatgtctcagccccgatgatgaagagaaattatgcgtttttttctactatttgtgtttccgggcgtttgaggaaggcataggccaaacccgccaccagcgtaccggcaataattgctaccaggtaacccaataccggcgtaatagcgccagggatcagcagaacaaacagaccaccgtgtggtgccatcagttttgcaccaatcgccattgagattgcgccagtcagcgccccaccaacgatacagcacggtagcacacgcatcggatcacgagcagcaaacggaattgcaccttccgaaataaagcacagaccaagtaccagagcggctttgccaccttcctgctgcgctttgtcgaatttgcgacgcgccaccattgttgccagacccattgccagcggtggcaccatacctgccgccataatcgccgccatcgggccataggtttgagtactcagcagacccacaccgaatgcgtacgctgctttgtttaccggaccgcccatgtcagtacacatcatgccaccgaggatcgcccccagcagaaccgcattcgcagtccccatggtctgcagccagtgagtcaacccatcgagaatgccagcaaccggtttaccgattaggtagatcatcgccagaccgaccaccagactggaaattagcggaatgatcaggatcggtttcagtgcctccatactctgtggcagtttcagttgcgtactgattaacttcgcaatgtaacccgccaagaagcccgcaataataccaccaatgaagccagaaccggtgctaaccgccagcataccgccaatcagacccggcgtgagacccggacgatcggcaatggagaaggcaatataacctgccagtaccggcaccatcagcgcaaaggctgaaccaccaccaatctgcatcagcgccgctgccaacgtacccggctctttaaacgcttcgataccaaaagcaaaagaaagcgcgatacacagaccacctgcaacaaccatcggcagcatgtaagagacgcccgtcagcaagtgacggtaagcgcctgcactctctttcttaccttcagtggtcgctgtttgagttttgcccgccggttcatacggcgttgcttcagcaaccgctttatccagttcctgcgcagttttcttcagcgccagaccggtagaggtgcgatacatcggtttaccagcaaatttcgccagatctacttcgatatctgccgccacaatcaccagatccgctgctgcgacttcttcaggggtgattgcattacccgcgccaacagaaccacgggtttcaactttcacccaccagccacgttttttcgcttcggtttcaatggcttcagccgccataaaggtgtgtgctacgccagtcgggcaagcagtcaccgcaactacgcgtttcggaccgctggcagcaaccggtgctgtcgcagcgaccggcgcagtgtaaggtttcgcatggcctttggcttcactcaggaacagctcagggtgcgcaactgcccgggaaatatcgcccagccagacatttttaccgttcagcgcgctgtcgttcgggatggaatcaccgagaacaatcgccatttcagcgtcgttcggattgtcgatgatttccagttttgcttttcgcgccgccgcgcccagcagggtcttcgccatataggcgcgtgcctgaccgagattagcgtcaataatcagcagcgttttcattatgcctctcctgctgtcagttaaaaggttgtaagtcgacgcgcgccatcattgcggccaactgcggacgatcggtaatacccacattgctttgacttaccgccagggctgcaacagctgtcgccagacgcagtgtgtgttcactggattcacgcatcagcaagccataaatcaggccaccaaccatagaatcccctgcgccaacggtgcttacgacatcgactgacggtggtttggcgatccattcgccggaggcattaacccaaagcgcgccttcggcacccagtgaaataacgacatgcgcgataccttgttcacgcagcgcatgcgcagcttcaatcacatctttcatttcaggcagtttacggcctgcccagatttccagctcgcggcggttaggtttcaccagccacggtgccgctttcaaacctgctactaacgcttcacggctactatcaaagataatgcaaggacactgactacgcaggcgagtcatccagtcggtgaacgcttccgggctgacgcctgacggtaagcttccgctgacacagaccatatcgaactgaccgagccagctcagagaatcagtcacaaagcgttcccagtcggcgggggtgacttcaaaacccgagaagttgaagtcggtcacttcgccgtctttttccgtcagcttaacgttaattcgggtgcgcccctgtacaacctggaaacggttggcaatgcccagctcgctgaacagttgctgaaaaccatcctgattgtctttacccaggaagccgccaacggtgacatcaattcccaggtcttttaatactttggccacgttgatgcctttacccgccgcatgcagaccggtggttttcaccaggttcacttcgccgcgttcaatttccgggcagaaaccaacaaggtcataagccggattaagggtgatcgtagcaacacgtctgctcattatgcgccctccccaagaccagcagcgatagcgtcgccaatggctttcagcgcctgttcagcatctgtaccctgggcggtaaagcgtaggcgatgacctttcttaacgccaagtgccacaactttcatcagactacgtccgtttgccggtttgccggtgccatcaaggtttgtcacggtaatatcactgttaaattgtttaatggtattgaccagcatggtacctggacgagcatgcaggccgtgttcattgcgcaccacaaactccgcgcttaacacgtcgtcggtcggcgcatcatcgctggtcagcagcgccagcaacgttgccgcatccgctttcagcaagcggtcagctttattatcgagcaacaaatcagcgagacgcttaagaaccgcgatgggctgatcgtcattcatcgccacactcaccagcatggctgccgtttcgccgtccacatcaaaagcatttgccgcacggcttaccgcaatcgcgctacgcagattgccttcggcgctatcgctcagccagataccctgcccgaggttcagcggttgttcattgatggctttggtgacgaaagtggcgtcaactgcccccgcttctttcagacgcgcagcgttcagcgcctgaagagtcagcagatcgctggcgacgatatccagcgtcagcatttcgttgtcgagcttcagctgctcactctgcttttcgcccatcagcaatgcgcgaagttcttctgctgttgttgctgacttcagttgttcagcaacggaatcatcgctcagtacgtgggtcagctggcgtagcaggcccagatgttcatccgagctggcagcaataccgatcgccacgtacgctacctggccgtcaccccaggtgacgccttccgggaactgaaatacctgaacgccggttttcagcacctgatcgcgggtgtcggtagtgccgtgtggaatagcaataccattgccgaggaacgttgaggtttgctgttcgcgcgccagcatgccattgacgtagccttcagctacattaccggcctgcaccagcgccgcagcgacctggcgaatcgcctcttctttgtctccggccttttcgcccggatggatgtcctgtacggataactggaacatagttctcctctcttgctgaattgaaacgattcagcttctatgagaaaaaagcgccaacctggcttagggttaaagacaagatcgcgctgaaacgtttcaagaaagcataatacttttgtttcagcacgcaaggaaagccgtaaagttatgagcaaaagtttgatgtgctgcacaattttttgtcatttttcctaattgctgatgggaaaatccgttatcagcaatttcatttcagcagcgtcagcagccaatcagcaacagtgaaatggcattttgattattcgtggcgcttttgatttcgctgtctgtttattttctgacaagcagcgtaaactccgcgtcttcctcttccagtgatcgaccagcatgcataactcccccgcagtcaccagcgcgaaatcgtttgacctgacctcgacggcgtttttaatcgttgcctttctcaccggtattgcgggcgctctgcaaaccccgacactcagtatttttcttactgatgaagtacatgcccgtccggcgatggtgggattcttctttaccggcagcgctgtcattgggattctggtgagtcagtttctcgccgggcgctctgataagcgcggcgatcgcaaatcgctgattgtcttttgctgcctgttaggcgtgctggcctgcaccctttttgcctggaatcgcaactactttgttttgctattcgttggcgtctttcttagcagctttggctcaaccgctaacccgcaaatgtttgcccttgcccgtgaacatgctgacaaaaccggacgtgaggcggtgatgttcagctcttttttacgcgctcaggtttcactggcatgggtcattggcccaccgctggcttatgccttagcgatgggtttcagctttacggtaatgtatctgagcgcagcggtagcgtttattgtttgcggcgtgatggtgtggctgtttttgccgtcgatgcaaaaagagcttccgctggcgaccggcacggttgaagcgccgcgccgtaaccgtcgcgatacgttgctgctgtttgtcatttgtacattgatgtggggctcgaacagcctgtacatcatcaacatgccgctatttattatcaacgaactgcatcttcccgagaaactggccggtgtgatgatggggaccgccgcagggctggaaatcccgaccatgttgatcgccggatattttgccaaacgtctgggtaagcgcttcttaatgcgcgttgctgccgtgggtggcgtctgtttttacgcaggaatgctgatggcgcattcacctgtcattctgttgggcttgcagctgctaaatgctatttttattggcattctgggcggcatcgggatgctctattttcaggatttgatgcccggtcaggcaggttcagccaccacgctctataccaacacgtcgcgcgtgggctggatcatcgcaggatcagtggcgggcatcgtcgccgagatctggaattatcacgctgtgttctggtttgcgatggtgatgattatcgctactctgttttgcttactgcgaattaaagatgtttaaggcgcggtcagcatttccagatcgataagccaggtcattgcctgctgacgcgagttgccgcacatttcagcgctggcttgtaagcctgcacagactttcggtcgcagtggcgaggtgaaaattttacagcgttgctgttcatcaagctgaatgcagggcgtattggcgggcttgccatctggcataccgggaatagggctggaaattgaaggggcagtgcaacacgccccgcaacccggacggcattccatacgttgttctcttaaggttaaccaccggattgatgagcgcgcacagtaccaccttttttgcaccagcaaaagtgcgaataccacttgcccgaaaggcccgtcgcgagtactttgtcgcgatatttttgacattttcgactacaggaatttttcgatgccaagagcgaacgaaattaaaaaaggtatggtactgaattacaacggcaaactgctgctggttaaggacattgatattcagtcgcccactgcccgcggtgccgctacgctgtacaaaatgcgtttttctgatgtccgtaccgggctgaaagtagaagagcgtttcaaaggtgatgatatcgttgacaccgtgacgctgacccgccgttacgttgacttctcctatgtcgatggcaacgaatatgtctttatggataaagaagactataccccgtataccttcaccaaagatcagattgaagaagagttgctgtttatgcctgagggcggcatgccggacatgcaggtgctgacctgggacggtcaattgctggcgcttgagctgccgcagaccgttgatctggaaatcgttgaaactgcaccaggcatcaaaggggcatctgccagcgcccgtaacaaaccggcgacattgagcactggtctggtgattcaggtaccagaatacttaagcccgggcgaaaaaattcgtatccatatcgaagaacgccgttatatgggtcgtgctgactaacttcagccgcatgcagaaaagggatagctcaggctgtcccttttttaatttattataccaatcttctattttgcgcttcctgaacaccttacgcccgcaattttcactcgttgattgatcgccctcacacttcatcgcattaacaatccagaccaatttcaattgttgtcatataactttacactgtcattgttaattaatcgttactaagacgtgactcctatgaatacaatcgcctccattacgctcccgcatcatgtacacgctccacgctacgatcgacagcagttgcaatcacgtatcgttcattttggctttggagcctttcaccgcgcacatcaggcgttactgaccgatcgtgtgctgaatgcccagggcggcgactgggggatctgtgagatcagcttgttcagcggcgatcaactgatgagccagctccgcgcacagaaccatttatataccgtgctggagaaaggtgcggacggcaatcaggcgataattgtcggtgccgttcacgactgcctgaatgcaaaactggattccttagcggcaattattgagaaattttgcgagccacaggtggcaattgtttccctgacgattaccgaaaaaggctattgtattgacccggccaccggtgcactcgacaccagcaatccgcggattattcacgatcttcaaaatcctgaagaacctcactccgcgccgggtattctcgtcgaagcactgaaacgacgccgtgaacgcggccttgcaccgtttaccgtactctcctgcgacaatattcccgacaatggccatgtggtgaaaaacgcggtgctggggatggcggaaaaacgttcaccagaactcgccgggtggataaaagaacacgtcagttttccgggaaccatggtcgaccgtattgttccggcagcaaccgacgaatcactggcagaaatcagccagcatctgggggtgaatgatccctgcgcgattagctgcgaaccgtttatccagtgggtggtggaagataacttcgtcgctgggcgtcctgcctgggaagtcgctggtgtacaaatggtgaatgatgtcctgccatgggaagagatgaaactgcgtatgcttaatggcagccactcttttctcgcttatctgggttacctctcaggattcgcgcacatcagtgattgcatgcaggatcgcgcatttcgccatgccgccagaacattaatgctggatgagcaagcgccgacactgcggattaaagatgtcgatttaacacaatatgcggataagttaattgcacgttttgctaatccggcactgaaacataagacctggcaaatcgcgatggatggcagccagaaattaccgcaacgcatgctggcaggtattcgcatacatctggggcgcgaaacggactggtcgttgctggcattaggcgttgcaggctggatgcgttacgtcagcggcgttgatgatgccggaaatgccattgatgttcgcgatccgcttagcgataaaattcgtgaacttgttgcgggcagcagcagtgaacaacgcgtaaccgccctgctttccctgcgtgaaattttcggtgatgatctgccagataacccgcattttgtgcaggccatcgaacaagcctggcaacaaatcgcacaattcggcgcgcatcaggcgctattaaacaccctcaaaatttaacgatttctgcggttaaagcggatgaagctcgccttcgtccgctctccccttctcttttctgccttttttagccaggattaacgctcagttaacttaccagagtattgcggagccgttgtgaccagaaccaacctcatcaccggttttctcggcagcgggaaaactacgtcgattcttcatctgttagcccataaagatcccaacgaaaaatgggcggtactggttaatgaatttggggaagtcggaattgatggtgctttgctcgccgatagcggcgcactgctgaaagagatccccggcggttgcatgtgctgcgttaatggtttacccatgcaggtagggttgaataccttactgcgtcagggaaaaccagaccgcttgttgatagagccgaccgggctgggccatccgaaacagctcctcgatctcttaaccgcacccgtctatgaaccgtggatagatctgcgcgccacgttgtgcattctcgatccacgcctgttgctggacgaaaaaagcgccagcaatgaaaacttccgtgaccaactggctgccgcagacattattgtcgccaataaatccgaccgtgcgacgcccgaaagtgagcaagcgctagagcgctggtggcagcaaaatggtggcgatcggcaattaattcacagcgagcatggaaaaattgacggtcatcttctggatttgccgcgtcgcaatttagccgagttgcccgccagcgccgcgcattctcatcagcatagcgtgaaaaaagggttagcagcgttaagcctgccagagcatcaacgctggcgtcgcagtctgaacagcggacaagggcatcaggcctgtggctggatattcgacgctgatacggtattcgacaccattggtattctggaatgggcgcgacttgcaccggtggaacgcgtcaaaggcgtgctgcgtattcccgaagggctggtgcgaatcaaccgtcagggcgatgacctgcacattgaaacgcaaaacgttgcgccaccggacagtcgtattgagctgatttccagcagcgaagctgactggaatgccttgcagagcgcgctgttgaagcttcgtttagcgactaccgcgtaaggttgcctgcgtttttcagtaagataattagagaaaatatgattaaaaatttgccgcaaatagtgttgttgaatattgtcggcctcgcgctgtttctttcctggtatattcccattaatcatggattctggttgccgattgatgcggatattttttatttctttaatcagaaactggtcgaaagtaaggcctttttgtggctggttgcattgaccaacaatcgcgctttcgacggttgttcactgctggcgatgggaatgttgatgctgagtttctggctgaaagaaaacgccccaggcagacgacgtatcgtgattattggtctggtcatgctattaactgcagtggtattaaaccagctgggtcaggcattaattcctgtaaaacgggccagcccaacgttgacttttaccaatattaaccgcgtcagcgaactgctctctgttcccacgaaagatgcctcacgagatagctttcccggcgatcacggtatgatgctgcttattttttcggcattcatgtggcgttatttcggcaaagttgcaggccttatcgcccttattatttttgtggtttttgcgtttcccagagtaatgattggcgcacactggtttactgacatcatcgtcggttccatgaccgtgatattgatcggtttgccctgggtgttgctgacgccattaagtgatcgattaatcaccttttttgacaaatcacttcctggaaaaaacaaacatttccaaaacaaataactcacagtaattaacatcatcaggtttatttttatagtgaggataatcctgatgatgcgcctcctgctttcatccatcgagcgcaaaaatcattctctaagtaaatgaatggattgcatgcgtttcactcaatcgtactttaattgaccaatcccgctgattaactttctgtatcactttttcttataaaaaatcatgtaaaaccgctcgccaagaccgcaccaatcgggtaatctcgaactcgttttgcctcggcggtagattatcctcacagcatataattttgtgcgttagtccacagatttggccttaaggaattgtttcaacatgcccaggtaattagtctcgtgtcgcttggcatttttttataacgatatttgtcgttaaggacttcaagggaaaacaaacaacatggtcaaatctcaaccgattttgagatatatcttgcgcgggatccccgcgattgcagtagcggttctgctttctgcatgtagtgcaaataacaccgcaaagaatatgcatcctgagacacgtgcagtgggtagtgaaacatcatcactgcaagcttctcaggatgaatttgaaaacctggttcgtaatgtcgacgtaaaatcgcgaattatggatcagtatgctgactggaaaggcgtacgctatcgtctgggcggcagcactaaaaaaggtatcgattgttctggtttcgtacagcgtacattccgtgagcaatttggcttagaacttccgcgttcgacttatgaacagcaggaaatgggtaaatctgtttcccgcagtaatttgcgtacgggtgatttagttctgttccgtgccggttcaacgggacgccatgtcggtatttatatcggcaacaaccagtttgtccatgcttccaccagcagtggtgttattatttccagcatgaatgaaccatactggaagaagcgttacaacgaagcacgccgggttctcagccgcagctaataaaccgtttggatgcaatcccttggctatcctgacgagttaactgaaagcactgcttaggcagtgcttttttgttttcattcatcagagaaaatgatgtttccgcgtcttgatccaggctatagtccggtcattgttatcttttaaatgttgtcgtaatttcaggaaattaacggaatcatgtttatacgcgctcccaattctggacgtaagctcctgcttacctgcattgttgcaggcgtgatgattgcgatactggtgagctgccttcagtttttagtggcctggcataagcacgaagccaaatacgacacactgattaccgacgtacaaaagtatctcgatacctattttgccgaccttaaatccactactgatcggctccagccgctgaccttagatacctgccagcaggctaaccccgaactgaccgcccgcgcggcgtttagcatgaatgttcgtacgtttgtgctggtaaaagataaaaaaacattctgttcatctgcgaccggtgagatggacattccactcaatgaattgattccggcgctcgacattaataaaaacgtcgatatggcgatcttacccggcacgccgatggtgccgaacaaacccgcaatcgtcatctggtatcgcaaccctttgctgaaaaatagcggcgtgtttgccgctctgaatctcaacctgacgccttcactcttttatagttcacggcaggaagattacgatggcctagccctcattattggtaatactgcgctatctaccttttcttcacgtttgatgaacgttaatgaattaaccgacatgccggtccgtgaaactaaaattgcgggcattcctttgaccgttcggctttatgcagatgactggacatggaacgatgtgtggtacgcatttttactgggtggcatgagtggaactttcgttggacttctctgctattacctgatgagtgtgcgtatgcgcccaggcagagaaatcatgaccgccatcaagcgcgaacaattttacgtggtgtatcaaccggtggttgatacacaagctttgcgggtaacgggcctggaagtactgctacgctggcgacatccagtagcaggtgaaatccccccggatgccttcattaactttgccgaagcgcaaaagatgattgtgccactgactcagcacctgtttgagttgattgcccgcgatgccgcagaattagaaaaagtactgccggtaggcgtcaaatttggcattaacattgcgccagcccacttgcacagcgaaagctttaaagcggatatccagaaactgctcacttccctgcccgcacaccatttccagattgtgctggaaattaccgagcgcgatatgctgaaagagcgagaagccacacaactcttcgcctggctgcattcggtcggcgtagaaattgctattgatgacttcggcaccgggcacagcgcgcttatctatcttgagcgttttacgctcgattatctgaaaattgatcgtggatttatcaacgccatcggtacggaaacgatcacttcacccgtacttgacgcggtgctgacgctggcgaaacgtctcaatatgctgacagttgctgaaggggtcgaaacgccagaacaggcacgatggctaagcgaacgcggcgttaatttcatgcaaggctactggattagtcgcccgttaccgctggacgattttgttcgctggctgaagaaaccgtatacgccgcagtggtaaggtgtgcttacgtcccttattattcatagtgaaagcatgccggattgcggctaatgatgagtaaaaggaaatccgttgcagatgattgtgcgcatactgctgctgtttatcgctctgttcacctttggtgcgcaggcgcaggctatcaaggaaagctatgcctttgccgtactgggcgaaccccggtacgcatttaatttcaaccattttgattatgtgaaccccgccgcgccaaaaggtgggcaaataacgttgtctgccctcggcaccttcgataatttcaaccgctatgcactacgcggcaacccgggcgcacgcaccgagcagctgtacgacacgctatttacgacttccgatgacgaaccaggcagttattacccgctgattgctgaaagcgcacgctatgctgacgattattcctgggtggaggtcgctattaatccgcgcgcccgttttcatgatggttcgcccattactgcccgcgatgtagagtttacttttcaaaaatttatgaccgaaggcgtgccgcaatttcgtctggtctacaaaggcaccaccgtcaaagccattgcgccgttaaccgtgcgcattgagttagctaaacccggcaaagaagatatgctgagtctgttttcgctgccggtatttccagaaaagtactggaaagatcacaaacttagcgacccgctcgccacgcctccgcttgccagtggtccgtaccgcattacgtcctggaaaatggggcaaaatattgtctattcccgcgtgaaagattactgggcagcaaacttaccggtaaaccgtggacgctggaatttcgacaccattcgctacgattattacctcgatgataatgtcgcctttgaagcgtttaaagccggtgcctttgatttgcgtatggaaaacgacgccaaaaactgggccacgcgctatagcggtaaaaatttcgataaaaaatacatcatcaaagatgagcaaaagaacgaatcagcccaggatacgcgctggctggcgtttaatatccaacgtccgatattcagcgatcgccgggtccgggaagcgatcactctcgcctttgactttgaatggatgaacaaggcgttgttttacaatgcctggagtcgcacgaacagttattttcagaataccgaatatgcggccagaaattaccccgacgccgcggaactggtgcttctggcaccaatgaaaaaagatctaccgccagaagtcttcacgcaaatctaccagccgccggtatccaaaggcgatggctacgatcgtgacaacctgttaaaagccgacaaacttctcaacgaagcaggctgggtgctgaagggtcagcaacgcgttaatgtcacaacgggtcagccactcagctttgaattattgcttcccgcaagcagcaatagtcagtgggtattgccgttccagcacagcctgcaacggctgggtatcaacatggacattcgcaaggtggataactcgcaaatcaccaaccgcatgcgcagtcgcgactatgacatgatgccgcgcgtatggcgggcgatgccgtggcccagttccgatttacaaatttcctggtcatcggaatatatcaattccacttataatgcccccggcgtgcaaagcccggttatcgactcgctgatcaaccaaattattgccgcgcagggaaataaagaaaaattactgccgttgggacgagcactggatcgcgtattaacgtggaattattacatgctgccaatgtggtacatggcggaagaccgtctcgcctggtgggataaattctcccaacccgctgtacgccctgtttacagcctgggtattgatacctggtggtatgacgttaataaagcgacgaaactgccgtcagccagacaacagggagagtagatgggcgcttatctgattcgccgtctgttgctggtgatcccaacgttatgggcgattatcactatcaactttttcatcgtgcaaattgcgcctggcggtccggtcgaccaggccatcgccgccattgagtttggtaatgccggagtattacccggcgcaggcggtgaaggtgttcgcgccagccatgcgcaaacgggcgtcggcaatatcagcgacagtaattaccgtggcggacgcggattagatccagaagtgatcgccgagatcactcatcgctacggtttcaataagccgatccacgaacgttacttcaaaatgctctgggactacatccgttttgattttggcgacagcctttttcgcagcgcctcggtgctgacgctgattaaagacagtctgccggtctccatcaccctcggattgtggagcacgctgattatctatctggtgtcgattccgttaggcattcgcaaagctgtttataatgggagccgttttgacgtctggagtagtgcatttatcatcatcggctacgccattccggcctttttgtttgccatcctgctgattgtcttcttcgcgggcggcagctatttcgatctgttccctctgcgcggcctggtttccgctaactttgattcgctgccgtggtatcagaaaatcaccgattatctgtggcatatcacgctgccggtgctggcgacagtgattggcggctttgcggctctgaccatgctgacaaaaaactcattccttgatgaagtgcgtaagcaatacgtggtgacggcacgtgcgaaaggggtaagtgaaaaaaatattctctggaaacatgtgttccgcaacgccatgctgctggtgattgccggttttccggcgacgtttatcagcatgttttttaccggctcgctgctgattgaggtgatgttttcactcaatggtcttggcttactgggctacgaagcgaccgtctcgcgcgattatcctgtaatgtttggtaccttgtatattttcaccctgattggcctgctgctgaatattgtcagtgatatcagctatacgctggtcgatccgcgtatagattttgagggacgttaatgtcgcgactcagccccgtcaatcaggcccgttgggcgcgttttcgccataaccgtcgcggctactggtcgttatggattttcctcgtcttgtttggtttgagtttgtgttctgaacttatcgccaacgataaaccgttgctggtgcgttatgacggcagttggtatttcccgttgttgaaaaactacagcgaaagcgattttggcggcccgctggcaagtcaggctgattatcaggacccgtggctgaaacaacggctggaaaataacggctgggtactgtgggcaccgattcgctttggtgctaccagtatcaactttgctaccgataagcccttcccttctccaccctcccggcaaaactggctgggaacggatgccaatggcggcgatgtgctggcacgcattctctatggcacgcggatctcagttctgtttggcctgatgctgaccctctgctccagcgtgatgggcgtgctggcgggggcgctacaaggctattacggtggtaaagtcgatctctgggggcaacgttttattgaagtatggtcggggatgccgacgctgtttttgattattttactttccagcgtcgtacagcctaacttctggtggctgttggcaattaccgtcttgtttggctggatgagtctggtcggtgtggtgcgggcggagtttttacgtacccgtaatttcgactacatccgcgcggcgcaggcgcttggcgtcagcgatcgcagtatcatcctgcgtcatatgttgccaaatgccatggtcgctaccctcacttttttaccgtttattttatgtagttcgataaccaccctgacctcactcgatttcctcggcttcggtctgccgctcggttcaccgtcactcggtgaactgctgttacaagggaaaaataaccttcaggccccgtggcttgggatcaccgccttcttatcggtggcgatattgttgtctttgttgatctttattggtgaagccgtccgcgacgcatttgatcctaataaggcggtgtagcatgacgcaaactctgttagcgattgaaaatttgtcggtgggttttcgccatcagcaaaccgtacgtacagtagtcaatgatgtttcactacagattgcggctggcgaaacgctggcgctggtaggtgagtctggttcaggtaagagcgttaccgcgctgtcaattttacgcctgctcccttgcccgccggttgaatatctctccggcgatattcgttttcatggcgaatcgctgcttcatgccagcgatcaaacgttgcgcggtgtacgcggtaataagatcgccatgatttttcaggagccgatggtgtcgttaaatccattacataccctggaaaaacagctttatgaagtactttcactccaccgcgggatgcgtcgggaagcggctcgtggcgaaattcttaactgccttgatcgcgtcggtatccgccaggcggcaaaacggctgacagattatccgcatcagctctccggcggcgaacgccagcgggtgatgattgcgatggcgctgttaacgcgaccggaattattaattgccgatgaaccaaccaccgcgctggacgtctctgtccaggcgcagattttacagctgttgcgcgaactgcaaggcgagctgaatatgggtatgctgtttattactcataacctcagcattgtcagaaaactggcccaccgcgtggcggtaatgcaaaacggtcgctgtgtcgagaaaaataacgccgctacgctatttgcctcacccactcatccttacacacaaaagctactcaacagtgaaccatctggcgacccggtgccattgccagaacccgcctcaacgttgctagatgttgaacagcttcaggttgccttccccatccgcaaagggattttgaagcgcattgtggatcataatgtggtggtgaaaaacatcagttttacgctacgggcgggtgaaacactgggtttagtgggcgagtccggttccgggaaaagcacgacgggactggcgctgctgcgactgattaattctcatggcagcatcgtctttgacggtcagccactgcaaaatttaaatcgccgccagctgttacctattcgtcatcgcattcaggtggtatttcaggatccaaactcctcactcaacccacgactcaacgttttgcaaattattgaggaaggcttacgggttcaccagccgacgctttctgccgcacaacgcgaacaacaagtgatagccgtgatgcatgaagtgggattagatcctgaaacacgccaccgttatccggcggagttctctggtggtcagcggcaacgtattgcgattgccagggcgttaattcttaagccctcgctgatcattcttgatgaaccaacatcatcactcgacaaaacggtgcaggcgcaaatattgacgctattgaaatcattgcaacaaaagcatcaactggcctatttgtttatcagccacgatttgcacgttgtccgcgcgttatgtcatcaggttatcgtactgcgacaaggggaagtagtggaacaaggaccgtgcgcgcgcgtgtttgccgcaccgcagcaggagtatacgcgtcagctactggcgttgagctgacgcttaaaaaggattgtagtttgaaaagggttcggcaattgccacaccaaaatttttcaatcggcatgttgcagcaaattcgtcctggcgatttacaaacaggcacggctcaccttcacactccagcaccgaacatggaacttcgatgtcgcttaacgcctggcttagtttgtacatcaccgaccatgcattatcaccatccgggctaagcaatttaagcgccaccaggctgttgtcaccgcacggtccattttgcggaatcggttcaaccttcgaacctgcgaaaccagcagaccagcgatagttctgcggcagtcgatggacgattgagagttgtaatgaagtcacttattttccccggaagtacattttacttcacaatttgtttacatcaattttaacacatcatcaacaatccgtctttatacagatcgtaaagattgatgcctcgcctgcgtggcctctatggctctgatttaaataatatctgcgggcgtggtcacgtttgcggggctatatgtacccgtttctgcgatctaactcaacctttttaactacaatgatgtgactttttacataaattgattttacataaaataaacatatatcgggggaatgatagatttgtggttgacatgcatcaacaaaggaagccttttagcttcctcgttgtgcaatagatcaccgttttttcggccgactggcgtacaaacagaagagaatggagctggttgcgcagaatgcaattgaccaaatcatcggccatgcagagttaaaggtcgcaagagaaagtaatgcgccaacaattgcccctatgccgaaacggaaggttcctgccagcgaagatgccgttcccgccatatggggaaactcatcaagaatgaccgccatcgcattggatgacaccatcgacacgcagcccacaaacgccgcaacgccaaccaccagcgaccagaatcccagccccagcagtgcactgatgaccatccacgctgccataataaactgtatccacaaccccgagcggaacatatttaacgcgccaatacggcggacgaagcggctgttaaagatggtcatcacgaacagaaaaagaatgtttagcgcaaagtaataaccaaagttttccggcgcgacgtggttgatttcaatgtagacaaacggtccggcgcttaagaatgagaacatcccggcaaagctgaaaccgctggccagcatataactcaggacacgcttatgacggaacagcgccgcaaagttaccaatagtggtacgaatgtgaaaaggctggcgacgctccggcggtaaggtttctttgatcagaaagaagatcattgccgaagccagaatcgccgccacggcgaggatccagaagatgtaatgccagctcagccacaccagcacccagccgccaactatcggtgccatcagcggtgcaatggtcgtcaccagcatgacaaacgacatcattcgcgagaactcttctttcgggtagatatcacgcatcaaagcgttgataaccacgctggccgcagccgcagccagcccgtggaagaaacgcatcacaatcagctgatcgatggtgtttgccaacgcacacgccaccgcggcggcggcaaacaccagcgtaccgccgagcaccaccggcttacgcccgaagctgtctgccatcggcccgtagattaactgccccaacgcaaagcccagaatataagtactcagggtcatctgcgtactgcccgccggtacaccaaactgcgctgaaattaccggtagcgcaggcagatacatatcaatcgacagcggcatcaacatggccagcaggccaaggataaaaacaatagcaaacgacgaatgctgtcgggtggtcacaacgggctcctgaaagtcattgaaaagttagacgacgctggcaatttcttcttcagttaacggacgatattcaccgggggctaaatcagcatccagcgtaatgccgccaatacgttcacgatgcagctcaaccacatggttacccacggcggcgaacatgcgtttcacctgatgataacgcccttcgctgatggtcagacgaacctgcgttggggtaatcacttccagcaccgccggcttagtgagatctttttcgttatgcagctgcacgcctttagcaaattgctctgccgtatcgtcagctacgggtgattccagcgttaccagataggtcttctcgcaatgatggcgcggggaagtaatgcggtgcgaccactgaccatcatctgtcattagtaccagaccggtggtatcgatatccagacgccctgcagcgtgcagtttccacgctaccggttcatcaagaaaatagagcaccgttgggtgatccgggtcgtccgtggagcaaacatagccctgaggcttattgagcatgaagtaacgtggaccgtgttgctgcgccagcgggttgccatcgtaagcgacatcatgttcagggagcagtttgaacgctgcattacggacgatttcgccatcgacggtgacacgattgccgcggatttcacgcccggcaatagcacggctaacgccgagttgctgtgcgataaatttatcaagtcgcatgtgtgtgattttgcctgtaaaaaacggaggtcgggtaatgacccgaaaatctgaactgttgtctgcccagtatagcggtctaataacttccctcaagggaaaaagatccgtggcatactattagcagaataatctacctacgcgagaccatgatttttacactccgcccatatcagcaagaagccgtggatgccacgctcaaccattttcgtcgtcataaaacccctgccgtaatcgtgctgcccaccggtgcaggtaaaagcctggtgatagcggaactggcgcggctggcgcgtggtcgcgtgctggtgttggcacacgttaaagaactggtggcacaaaaccatgaaaaatatcaggcgctggggctggaagccgatatttttgccgccgggctaaagcgcaaagagagccacggtaaagttgtatttggcagcgtgcagtcggtcacccgtaatcttgatgcctttcagggtgaattttcgctgttgattgtcgatgaatgccaccgtattggtgacgatgaagagagccagtatcagcaaatcctcactcacctgaccaaagtgaatccccacttacgcctgctggggctgactgccacgccttttcgactgggcaaaggctggatttatcagttccattatcacggcatggtacgcggcgatgagaaagcccttttccgtgactgcatttatgagctgccgctgcgttatatgattaaacacggctatctgacgccgccagaacggctggatatgccagtcgtgcaatacgatttcagccgcttgcaggcacagagtaacggactgttcagcgaagccgatctcaaccgcgagctgaaaaaacagcaacgcattacgccacacatcatcagccaaatcatggagtttgctgcaacgcgcaaaggggtgatgattttcgccgcgacggtcgaacacgcaaaagagattgtgggattactgcctgccgaagatgcagcactgattactggcgacacacccggctctgagcgcgatgtgttaattgatgattttaaagcccagcgttttcgctatctggtcaacgtcgcggtactgaccaccggatttgacgccccgcacgtcgatcttatcgccattctgcgccctaccgaatcagtgagtctttaccaacaaattgtcgggcgcggtctgcgcctggcccccggcaagactgattgcttaattcttgattatgcgggtaaccctcacgatctctacgcgccggaagttggtacaccgaaaggcaaaagtgacaacgttccggtacaggttttctgccctgcctgcggttttgccaacaccttttgggggaaaacgaccgccgacgggacattgattgaacactttggtcgtcgctgtcagggatggtttgaagatgacgacggacatcgcgaacagtgtgacttccgtttccgttttaaaaattgcccgcaatgtaacgcagaaaatgatattgccgctcgccgctgccgcgaatgtgacacggtactggttgatccggatgatatgttaaaagcggcgctacgactgaaagacgcgctggtattacgctgtagcggcatgtctttgcagcatggacacgacgagaaaggcgaatggttgaaaatcacctattacgatgaagacggcgcggatgtgagtgagcgtttccgtctgcaaacgcccgcccagcgtaccgccttcgagcagctttttatccgcccgcatacgcgcacaccgggcatccctctgcgctggatcaccgccgccgatatcctcgcccagcaagcattactgcgacacccggattttgtcgtcgcccgcatgaaaggtcagtactggcaagtgcgtgaaaaagtgttcgattacgaaggtcgttttcgtcgggcgcacgaattacgcggttaatggtagttttgattgatgtataaggcgattgagtatagaatctcgcccgcttttgcatacgcaaagcagatcacttacctgttgctgggtcgcctgtagcaggattaatttaagagagaaagaaatgtttactatcaacgcagaagtacgtaaagagcagggtaagggtgcgagccgccgcctgcgtgccgctaacaagttcccggcaatcatctacggtggcaaagaagcgccgctggctgtcgaactggatcacgacaaagtcatgaacatgcaagttaaagctgaattctacagcgaagttctgaccatcgttgttgacggtaaagaaatcaaagttaaagctcaggacgtacagcgtcacccgtacaaaccgaagctgctgcacatcgacttcgttcgcgcttaattgctgaataagttgtaaaaaaccccgctccggcggggttttttgtctctgcaaattatgcctgattacggtattgctattttttgcaggccagataaggcgttcacgccgcatctggcattcagaacacaaaaccgattaattgccgccagacgtccggcgctgcaattgatcgcgcaagttcggcggcgtgcctttaatggtcagggtatcggttgctggatcccagaagatgcgttcacctaacagcatcgcatcaaagttaatagtcaagccaccgccgctaccggcaaacttcgtcaactgacgcagtgtgctacggtctgccgggaagctctcttccagttcgtagcctttttcagccgcaaactccgtgaagctcacttcgctgacgcctgccagctctttcgacagcgattccagttcaatctcttcacctgcctgcagctgctcattacagtagctataaacctgctggcgcacgttctgtcgctctgctttatccagttgtgcttcggcagtgaaatcatcgaccgcttgcaacagcccacggttttgcgctttcgcgtttaacccttcgctggcaccgaggaaatccataaagaaatccgccactttgcgccctactcgccctttcaggaaagtgagatagcgggtcgactctggattggtttcccactcggttaaatcgatacgcgcaacaatatccgcatgattgatatcaagataatgggttgggttgatgtcgagattttcgttaacacgcatactgctcaggttgctcagaactgccaccagcagatactccaccgccagatagcgatagtggcaaaacagcacgaatccaccgtcagcaaaaggatatttcgctaattcgtcacgcaggcgaccggttgccgcgcggctaaatgccagaaagtcctcttcgccctgacgctgtaagcgcagcgtctgcgccagttcactctcttcgctaaacaagccgtaagctttatttttggcgctatagacccgatgcagttctgccaccatctcaacgacggtttccgtcggttccagcaatgaatcgcgcaacaccagctcaaggttctgctcatcacgcttgataagctggtgcagagcaatctggttgatatccagactcatgataaactctcctttaagaccgggcggtattcaaccaccgccggttaagcgacgcaataaaagatggcggtcattttacagaaggcagcgtaacgagaatgatttaacgcataaaaaagcagaaaaaaaaccgttgctacggtaatatgttgccctttcatcaactaactgatttcgatttatgccacaaatttcccgctacagtgatgaacaggttgaacaattgctcgcagagctgctcaacgtactggaaaaacataaggctccgaccgacctttccctgatggtgttaggcaacatggtcactaaccttatcaacaccagcattgccccggcccaacgccaggcaattgccaactcttttgcccgcgccttacagtcctctatcaacgaagacaaagcgcactaagggaaacagataacaggttatggtaactcatcgtcagcgctaccgtgaaaaagtctcccagatggtcagttgggggcactggtttgcactgttcaatattctgctttcgctcgtcattggcagccgttacctgtttatcgccgactggccgacaacgcttgctggtcgcatttattcctacgtaagcattatcggtcatttcagcttcctggtgttcgccacctacttgctgatcctcttcccgctaacctttatcgtcggctcccagaggctgatgaggtttttgtccgtcattctggcaacggcgggaatgacgctattactgatcgacagcgaagtctttactcgtttccatctccatcttaatcccatcgtctggcagctggttatcaacccagacgaaaatgagatggcgcgcgactggcagctaatgttcatcagtgtgccggttattttattgcttgaactggtgtttgcgacgtggagctggcaaaagctgcgcagcctgacgcgtcgtcggcgcttcgcgcgcccgctggccgcattcttatttatcgcctttatcgcctcgcatgtggtttatatctgggccgatgccaacttctatcgcccgatcaccatgcagcgcgctaacctgccgctttcgtacccgatgacggcacgacgttttcttgagaagcatggcctgcttgatgcgcaggagtatcaacgccgtcttattgagcaaggcaatccagacgccgtttccgttcagtatccgttaagcgaactgcgctatcgcgatatgggcaccgggcagaatgtgctgttgattactgtcgatggcctgaactactcacgcttcgagaagcagatgcctgcgctggcaggttttgctgagcaaaatatttcgttcacgcgccatatgagctccggcaacactacagacaacggcatctttggcctgttctatggcatctcgccgagctatatggacggcattctgtcgactcgtacgcctgcggcgttaattactgcgcttaatcagcaaggctatcagctggggttattctcatcagatggctttaccagcccgctgtatcgtcaggcattgttgtcagatttctcgatgccgagtgtacgcacccaatccgacgaacagaccgccacgcagtggatcaactggctgggccgctacgcacaagaagataaccgctggttctcgtgggtctctttcaatggcacaaacattgacgacagcaatcagcaggcatttgcacggaaatatagccgggcagcaggcaatgtcgatgaccagatcaaccgcgtgctcaatgcactgcgtgattctggcaaactggacaatacggtggtgattatcactgccgggcggggtattccgctgagcgaagaggaagaaacctttgactggtcccacggtcatctgcaggtgccattagtgattcactggccaggcaccccggcgcagcgtattaatgcgctgactgatcataccgatctgatgacgacgctgatgcaacgcctgctacatgtcagcacacctgccagcgaatattcgcaaggtcaggatttgttcaaccctcaacgccgccattactgggttaccgccgcggataacgatacgctggcaattaccaccccgaaaaagacgctggtgctgaacaataacggtaaataccgcacttacaacttacgtggtgaaagagtgaaagatgaaaaaccacagttaagtttgttattgcaagtactgacagacgagaagcgttttatcgctaactgattaattataaatcagttagcaaaatatcttacttgcaatcggtgtggaaaacggtagtattagcagccacgagtcggcacgtagcgcagcctggtagcgcaccgtcatggggtgtcgggggtcggaggttcaaatcctctcgtgccgaccaaaaatcccaagaaaaccaacctattgcggttggtttttttatatctgcatttaattcgataaacagacagcgacacatcacggcctgtttattttctgttatcagaacgtccagactacacccgcctgagttgtgctgctttcttcacgggagaaacggctgtcgataccaagcgttagccccgtcaatgtttgctcaaagccagcgcctgcatcagtggtcacgttgttgcggctgttaattgccgaactccacatcgccgccctttacgctaccaagacgctcacgcacggtgtccagttctgcatcaaataccagcggttgtgctgccgccatattcagcacatccgtggttgaagggggcatttgtgcgcgattctctgcgagactccagctatggttgccattatccagcaaggtatattcatacgtactgatatcaacaacgcctccggcattgcccaacgtaaatgccgcatcaccgcgcccgttgttaccagtgtaaggttatctcctgctgccggcctggcaccggtgtccgtcacgaatattttgaaatcacctgttgctttaacctccagtagccctcccttttctataacggcaaagacggcaatcccatctttttcaacaattaagcgcccgcctttaatcgtgggatcattcgccgcgccataaacctgtagcactccattattgatcgtagtctggtttaccgcgccacccatttgaacaatttgataaccatcatttaatactgagtattctgcggtgccatttatttcaatgtactgatatcccccgttaatttcagtattactacttacaccaaattcttatatatgctgttctccgccaggattgattttcgtattattggcggccctacaaaccagctggatatctttttccaggacaacaccatcaactgtctcaccatactcaacagttgatgccaatgctatgggcgaatataacgctgtagccaccagaacagatattgcggaacgacaaagagaaacagaaccagattggtgcattaagctttcatcctatgaaattaattgctgttaaaagcattggggacagaaaatacccatagctccatacccggagtcagttttaaaaaactgtttaaagaaatgcacaagtattgtgattgattttttagttgtttttcctgatgagaagctgatgcaaaattccgtctttataatgaagatgatgccaaagcgaacgacaaagttgtagttttcactacatgtccatacataaaatggggtaacattcacgcgcctggtagcgttaccaacgctacgctcaaacataatgattctaataaaacctcaggagactactatgcctgaagcaacgccttttcaggtgatgattgtggatgatcatccacttatgcgacgcggtgttcgtcagttactggagcttgattctggctttgaagtggtcgccgaagcgggcgacggcgcaagcgcgatcgatctggcgaatagactggatatcgacgtgatcttgctggatctcaatatgaaaggcatgagtggcctggataccctcaatgccttgcgcagggatggcgttaccgcgcaaattattatcctgaccgtatcagatgcctccagcgatgtctttgcactgatagacgcaggcgcagacggttatctgttgaaagacagcgacccggaagtgttactggaagcaattcgtgccggagcgaaaggcagcaaagtctttagcgaacgcgtcaatcagtacttacgtgaacgtgaaatgtttggcgcggaagaagaccccttcagcgtgctgacagaacgcgagctggatgttctgcacgagctggcacaggggctgtcaaataaacagattgcctcggtgttgaatatttccgagcagacagtaaaagtccatattcgcaatctgctgcgtaaactcaacgtccgctcacgcgtggcggccaccattctgttcctgcaacaacgcggggcacaataaaaatagcccgatggcatcaccatcgggccactttttatttactctcctgcggcgacaaatgttgcatcgcctgcgcgatactacgttcgatcaccgcacggcgagtatcgttggcaggtaagagtttcaacatcatttcccacgcggcaacggcttcgccaaatcgttgctgctcaaaggcattaaatgcatacatgcttaacacacggatattgctatggtccgttctcaccaactggcgcagcagttcgccgccgaggcggttgtcgttgggatcagatgaacgtgtcaacgcttcagcgtatcccagtgcagcatcgctgtttttcggatcgaggcgatacgcagtggcgtatgcatcggtggcgatactggcgttacccagcgccatgccaacgcggcccaacataatccagccttctatatctcccggatttttttgcagttgagtacgcatccccagcgcaaggcgcgacatctcttcttcgttgagcggatcggctttcggatccagcgccctgtccagtaacgccggagcctgtgccgtggcctgctgccagattttcacctgctgataattgccagtctggtagtagctgacgccagccacaattaacgccaccacaatacccggcagataaacaacatatccggcacgcttaccttccggcacgctttgttctggaaacgcttccagcaccacgcgtacccgacgccgcgaacgggcgtatatgacccaaccgccaatgccaatagccactactggcagcacccacagcagcacggtcagcggcgttaacggcggatcgtaagtgacgaagttgccgtaacgcgccaccatataatcgacaatctctttcttacttttgccttcctgcatcagttcatacactttctggcgcaggtcggtggcaatcatcgagttggaatcggcaatgctgttgttctggcatttcgggcagcgcagttcttcagtgagctgacggaactgttgttcctgtgcttcatctttaaactgcaacacgtcgatggtcgccagcgctgagccggagatcatcagcatcagcacgcccaataaaaacctcattgtgcggcctccttactgtatttctcccacagtggcttgatctcttcttcccagacgcgaggattgagatcgcccgcatggcgatagcgaatgatgccgttgccgtcaataaggaacgtttctggcgcgccatagacaccgagatccagccctaacatgccgtcgccatcaaacaggcttagcgcgtaaggattgcccagctctttcagccagctgattgccttctggcgatcgtctttatagttcatgccgaccacgcggatgccctgcgcagaaagctgattcagatattgatgttccgcacggcaggtcggacaccaggtcgcccagacgttaagcagcactggtttgccctgagtcagcacatccgcctgataaaactgccccggattgtccagtgattcgaggcgaaacttcggcactggcttgccaatgagcgccgattccagattggtcggatcatccccttcggcattacgcgccagctgccacagcagcgccgcggcaatcgccaggaagataatcaacggaattaacaataccttgcgcttcatgcagcctccggcgcagttttctgcgggttcacgcgcttacgatagcgaggatcaaacagacacagcagtccgcccaacgccatcatcagcccgcccgcccaaatccagcgaacaaatggtttgtagtaaagacgcacggcccacgcgccgttttccagctcttcaccgagcgccgcgtacaggtcacgcgtgatgccaccgtcaatcgccgcttcggtcatcatcgacccggcagtgttgtaataacgtttttctgcatacagcactgtttccggctttccatctcgcgttacgccgatggtcgccacaccgccacgccagtttggaccagtcacttctttgacatcacggaaggtgaagcgatattcatgaatatcgacgctatcgccggacttcatgcgcacatcacgctcaacgctatagttctgactaaaagcaatgccaacaattgtcactgccagccccaggtgagctgccaccatcccccaataactgaaggtggttttcgtgccgcgtgaaatacgcagcgcagcttccgcaattgccagcaccgcaatccagcaggccattgccaggccgagcaccgtcatcgccacaactttgctttcgaacagccacggcaacagcagcgacagcaccagcgtagagatgaaggcgataatcaacaaattgcggattttacgtgggcgatcgcgtccccagcgcaccagagggccgacaccaagcagtagcgcaaacggcaccatcagccaggtaaacatggtgttgaagaacggttcgccaatcgaaatactgcccagtcccagttgcttgtgcaccagcggcagcaacgtccccagcaacaccaccagcatcgcggcgaccagcaaaacgttgttcgctaacagcaaagattcccgcgaccacagcgcattgtttacgcgtgagcgaactttgtgtccacgcgcggcaaacagcagcagcgaaccgccaatcaccaacaccataaaggcgaggataaacataccgcgcgccggatcagacgcaaacgcgtgtaccgataccagcacgccggaacgcaccaggaaagtccccagcagacacaacgagaaggcactgattgccagcagtaatgtccacgctttgaagctggcgcgttgttcagtgaccgccagtgagtgcatcagcgcagtccccaccagccacggcataaacgaggcgttttctaccggatcccagaaccaccagccgccccagccgagttcgtaataggcccatgcggaaccgagcacaatgccgagcgtcaggaaaatccacgctgccagcgtccacgggcgagtaaaacgcgcataagtgctgtccagacgcccactcagcaaagaagcaatggcaaaagcaaacgccaccgagaaacccacgtaccccatataaagcagaggcggatggaagatcagccccggatcctgcaacagtgggttaagatcacgcccttcaatcgggaaattcggcagcgtgcgtgagaacgggttagaggtaaagagaatgaacagcaaaaagccgacactgaccatccccattatcgccagtacgcgggcaacaatatccagcggaatacgctgactaaaaatcgctaccgcaaaggtccagccgctcatcagtagcacccacagcaggagcgagccttcatgcgcgccccaggtagccgccacgcgataccacaccggaagctgggtattggagttgctggcaacataggtgacggtaaagtcgttgaccacgaaagcattgaccagcaccagaaatgcgccagccacagacataaacagcagccaggcaaacaagcgggaagacgccatcatgcgcgcgtccccgcgcgccacgccccatagcggatacacggacagcagcagcgcaattcctagcgccagacacagcagcccgttaccaatttctggcatcatgatgctgggtccttataaacactcgccgggcgacggtggttagcttccatcgctttctcaacttctggcggcgtgtagttttcatcgtgtttcgccagcacttctttcgcgaggatatgattgcctttttccagttcgccctgcaccacaacgccctgcccttcacggaacagatccggcaaaatgccttcgtaagagacatctactgaaccttcagcgtcgtaaatggtgaaagttacttttagcgaattgggatcgcgctgcacactccccggcatcaccatcccgccaacgcgcagacgctgaccgacttccggcatctgctgagtttcacgcttgccgtagagaatctcccccggcgtataaaagagatcgatattcgagcgcagcgcatatagcaccagaccgatagtcagcgccagccccgccagcacggcacaggcaatccacaagcggtttttacggcgaatattcatgcagcctcctgctgttgcgcagcacgtaaacgcgcctcacgcgcccgctgttgcgccacgccacgcagaattgcgcgatgttgcatcaccgagtgcacgaccaaaaccaccagcggaataacggtcatcaccaccgccaaccagacaaaaaaggcgtaaccgcccattgcgaaaaattcattccaggaagcaaatgcaggggtcatttacggcctcttttcagtatcagttcactcacccacggacggcgtttttccatcagcaaaatcaaattacgcatccgcatcagcgtcagcgtggcagacaggagcaggaagccaaaaatcgaccagcgcagcggcgaacgcatcgccggatcgatactttgctgcatccgcgttgatccctgatgcagggtgttccaccactcaacggagtaatgaataatcggcagattcaccacgccaatcagcaccaggatacctgccgcacggccagccagacgacggtcgtcgaaggcgtgccacagggcaatgacaccaacatacagaaacagcagcaccagttcagaagtcagacgtgcatcccatacccaccaggtgccccacatcggttttccccatgcagagccggtaaccagggcaataaaggtaaacacggcaccaatgggggccatcgccgccaccgccaggttggccattttcatctgccagaccaggccaataaacgctgccaccgccattgatgcataaatgcccatcgaccagatcgccgcaggcacatgcaggtagataatgcggtagctatttccctgctgataatcagccggagcaaagccgaacccccagatccagccgacggtaagcacgaccacactggcaattgccagccacggtataaaccagccacagatttgatacagccgtggtgggatcgccagttgatgcagtgttttccacatagtttcgataccagactcgaacaaaaatcagtaatccagcgttattgaatgctgattcgtaacgctgccgccgtcgcaaaaggacttaatgtcgcggtgcctgccagcaacgcgcctaaaattgccagatacccatcaacgggcaaatgcatagaagccgcgtccatcgcggcggtggcaaagatgagtaatgggatagtcagcggtaacaccagtatgctgagcagcacaccaccgcgcttaagtcccactgtcagcgccacgcccggcgcaccgagaaagccaagcgtaggggttcccagcagcagcgtcagcgccatcacttgccagccataaacatccattcccagtagcattgctaccaggggcgaaaggatgagtaacggcagaccggttaccatccagtgcgccatcaccttcgccagcacaacggcgggcaagggtaacggcaacaacatcaattgttcaagactgccgtcctgcaaatcgtcacggaacagtcgctcgagtgccagcaaggatgaaagcaacgcagcaacccagataatgcccggtgcaatacgcgccagcagttgcggctccggaccgatactgagcggaaaaagggtaatgacaatcaggaagaaccacagcgggttggcgatttcggcgctatggcgaaacgccacgcgcagctcaagacggaaaatgcgccagaacatcatgcggcccccgtttgcgtcagtgaaatgcggcgaattttactttcagcaacgttgagcggctggtgggtagtcagaatcacaatccccccctgctccgtatgctgcgccatacgctgggtcagacgatcgacgccgttaacgtcaatcgcggtaaaaggctcgtcgagtatccataacgtggcacgggtcagccacagacgcgctaaagcgacgcggcgttgttgcccggcagaaagttgatttaccggaatatcttcgaatccggcaagcccggcctgcgccagggcttccagacattgtgcggtatcgccatcgcgatgataaaagtgcagattttctaacgccgtcagccgggttttgatccccggctgatggcctatccataacaggttttgatggtagctgtcgcgtacctgatgcaaaggctgcccttgccagagaacgtcacccgcatcagggcgagacaaccccgtcagcaaacggagaagcgttgtcttccccgcgccgttgctaccggtgatttgtacccactctcctgcgttcagcgtaaatgacaagccactaaataaggttcgttcatcccgctcgcaaagtaactctctggcttcaagcatacccacgcaataaccctgttaaaaacctggctcgacttcgcgcatatcgggcagcttgtgcgctatccctttatggcaatcaatacaggtttgcccatctttcaccgcctggtcatgcatcttcgcggcaaccgatttctgggcggttgtatccatatactcgaagttgtgacagttacggcactcctgcgagttattgtccttcatgcgccgccactcattctgtgccatcgtcaggcgatgagcttcaaatttctgcggcgtgtcaataacgccaaaaattttaccatacagctctttacttgctttgagcttgcgtatcatcttcggcacaaactcgtgcggaacgtgacaatccggacaggtcgcacggacgccgctacggttgttgtagtgcacggaatccatgtattcctgatacaccgtgttacgcatttcgtggcagctaatgcagaactcttcggtattggctttttccatcccggtgttaaagccgccccagaagacgatgccgccgacaaaaccgatcaacagcagcgtccccagcgccagacggctgggggtacgccaccatttccacaggcgcttaatcagaccaggcttacggtcagaatttcccataataacctcttatttcccgtaaccttttgatggggtaaaggtattccccacgattggcgcggtatcggcctgcggtacgtgacattgcagacagaaataacgacgcggagccacttccgcgcccactttgccgtcgctgtccataaagtgagtaggactgatgcgcggcgcgccagtggtgcgatagctttcgacaccgtggcactgcaagcagcggttggtattggtcgttacctgataaccttcaacgctatgcgggatcattggcggctgattcacatagttcagcggcatccgttcctgctcttttggcatccgaatggccccttcctgcgtcccggatacttccggcgactggctaaaatcgacgccattagccgcccaaaccgcgccgctcaccaccagggccagcatcgccgtccattgacacagcgctttcttcaggtcatggcttttcatgatttcgctcccgaactccatcgtgtagttattgtaaatacatcctcagaacagacatccacgcagcgaccgcacgtcatgcaatcgcggctggtgacctgcaccgggctttgttcatccagcaccggggcacgtagcacatgcggttccgggcaaacatgaaaacaatccatacagcggttacatttctgccgatcgctggccgcaacggtaatcacacctttgctacccagcacgccatacagcgcgccaaccggacaaatgtgaccgcaccagccgtgttcaacgaccagtagatcaaataaaaacagcgcgagaataagcagcgcgccgctaccgaagcccattaccaggctgcgccccatcagggaaacggggttgatccattcccagatgagcgtgccggttaaggccgatcccaccagaatgaccaccaacagcacgtagcgaatgtggcgagggatcgtcgcagactgattgaggtcaaagcgcctgcgtaaccagttcgctaagtcggtaatcgggttcagcgggcagacccagctgcaaaataatcgctttcctgccagggcgtagagcacggtgataattaccgcaccagtcagtgctaccgtggcaggcagatgaccgctggcaaggctttgcagcgtcatcagcggatcggtcagcggaacggtgtcgaataacaggctactgctgtagttgccgtgcaagatccacacaccaaaccacggaccgctcaaaaacatccccagcacgaagaactgacaaaggcgacgtaacactaaccaacggtgactgcgccaccagccttttttctccagcgcctcgcgcccggcgtcacgtttacgatttgccattgttcccctccagccagccgaagcggtaatggtgacctaactcccctttcgccagtgacagcggtaacaccttgattgccggttgttccagcacgcacactttttcgcacttaccgcagccggtacaggcgtcgctgtgaaccgtcggcagaaagcgggcgtgcttaccggttcgcgtgttgcgctccagctccagggtgatggcctcatcaattttcgggcattcgcgataacaaacatcgcagcgcagcccctgaaagttgagacagttttcctggtccaccagtaccgccagccccatccgcgcgtcgtcgatcgattcgatctcacgatccagcgcaccgctcgggcacactttggcgcacggaatgtcctcacacatttcgcaaggaatatcccgtgcgacaaaatatggcgtgcccgccgacagaccagaggccagcgtcgccagttttaaggtgtcgtaagggcaagcctgaacacactgaccgcaacgcacacaggcactggcaaaggcgttctcgtttatggctccgggcgggcgcaaccgcacaccagatgcgcgtgcggtttgctgttgtaaccccagcgccacacccacggcagccagcccgcctgctgtgcgaacgacatcgcgcagaaagcggcggcgaccattttgaggtttcgctgaccgggacataatggcttacaccttctccagtttgaccgcgcacttcttgaagtccgtctctttcgagagcggatcggtcgcatccagcgtcagtttgttaaccagctgtgcggcgtcgaagaacggcatgtacaccaggccctgcggcggacggttacgaccgcgcgtttcgacaatcgagatcacttcgccacggcgagaaaccactttcactttgtcgccacggcgcagatcgcgcgctttcgcatccagcgggtgaataaacagaaccgcttccgggaaggcgcggtgcagttccggtacacggcgagtcatactgccggtatgccagtgctccaggacgcgtccggtagagagccacaggtcgtactcttcatccggtgcttccgccgcaggttcgaacggcagcgcgaagatcaccgctttgccatccggtttaccgtagaacttgtagccttcgcccgctttcacgtacgggtcgttaccttcgctgtaacgccactgcgtttctttaccgttcaccaccggccagcgcagaccgcgtgctttgtggtaatcatcgaacggcgcgagatcgtgaccgtgaccgcgaccaaaccatgcgtactcttcgaacagccctttttgcagatagaagcccagctcgcgggattcatcgttcagctgatcttccgccagttcggataccgggaatttgctcacttccggagtggcatacagaacttcgtacagcgttttgccgcgcagttctggtttcttcgccagcaactcttccggccacacttcttcagttttgaagcgacgggagaactgaactaactgccagagatccgattttgcttcacccggtgcctgtacctgctgacgccagaactgagtacggcgttcggcattaccgtaagcgccctctttctctacccacattgcggtcggcaggatcaagtcggctgccagcgcactgactgtcggatacggatcggaaacgatgataaagttgcgcggatcgcgccagcccggcatacgctcttcattaatgttcggtccggcctgcatgttattggtacacatggtccagtaaacattcagtttgccgtctttcagcgcacggtcttgtgccaccgcgtgcagaccgattttcgccggaatggtgccactcgggatattccacttcttctcgcaaatatcacgatgtttctcgttagtcaccaccatgtccgcaggcagacggtgagcaaaggtgcccacttcacgcgcagtaccacacgcggaaggctgcccggtcagggagaacggaccgcaacccggctgggaaattttgccggtcagcaggtgcaggttgtagaccaggttgttggcccacacaccacgggtatgctggttgaagcccatcgtccagtaggagatgactttcttgttcggatcggcatacagctgcgccagttgttctaactggtctttcggcacgccggtcatttcggcggttttttccagcgtatattcagcaacgaaggctttgtaatcttcaaagctcatcggttcggaggcgtcagaacccggattcttcgctgctttttccagcggatgggtcggacgtaaaccgtagccgatgtccgtcgctcctttgcgcaggttaacgtgtttgctgaagaagtcctgatttatcgcattgttttgaatgatatagttggcgatatagttcaggatcaccaggtcagattgcggcgtaaagatgatgccgttatccgccagctcgaagctacgatgctggtaggtagaaagcaccgccacggtaacgttctggttagagagacgacggttagtgatgcgcgaccagaggatcgggtgcatctccgccatgtttgcgccccacagcacaaacgcgtcagcctgctcgatgtcgtcgtagcagcccatcggctcatccataccaaaggtacgcataaagccaactactgccgacgccatacagtgacgcgcgttcgggtcgatgttgttcgaacggaagcccgctttgaacaacttggacgcggcataaccttcccagatagtccactgaccagaaccgaacataccgatcgattccggccctttttctttcagggcagtcttaaatttctcttccatcacatcgaaggcctgatcccaggtgattggggtaaattcgccttctttgtcatatttaccgtttttcatacgcagcagcggctgcgtcaaacggtctttaccgtacatgattttgggcaggaaatagcccttaatgcagttcaggccacggttaaccggtgcgtccgggtcgccctgacaggccaccacacgcccctgctgcgttccgaccagaacgccgcaacccgtaccgcagaaacggcacggcgctttatcccatttaatggcttcctgctgaccaacaacggcgcgggcaacgcccggcacgctgaaaccggcagccgccgcagcggccgcaacggcgttagctttcataaagctacgacgactgagtttcatggtgtttcctcaccttgctcttcctgctggtgataaaccagcgacaccgccagcacgccctctacgttgcgtactgactcaatggtttggatcagcgtttcgctgtcttctgcttccaccaccacaatcaactgaccgctcggcgcgtcgctgacagcaacttcacagccggtaaaggcgttcagttgggtgctgatgtctgaaattcgttcgcttttggcctgcacgaccaggctgcaaacttgccagttagtgtgcatggagatactccgcagttatggctgataccggacagctggctgcacatgctccacatccgttgcaaagttggctattaagttgcggctggtagatcccggagagcgtcgggcgaaagataattgccattggctcacagctatcctgacagcggcggcattcaactgactgatacgccaggcacgcgtccccaatggtgaactgcaaatcccaggccctggtgtggcgcggagaaaatagcgattcggggcaagcctgcgcgcaggcgtaacagaagctgcactcgttatttttgaaattaacgctcggatagccacccgcgccgcgttgcagaatgttgttttcacaagcattaatacaggcgtcgcagcgggtgcaatgggtcagaaaatgagattcatcaccggaccagggcggacggataccgttactggctttgcgccagcgaccagtgagtatgccccgacgggatgcatcaatcttcacattgaccttccatcattaacgcgctctgaaaattgagagcgaccaaataaaccgcataattaataagccatttttatagccgctaagatattaaaggatgtgtcaaagatgcataccccgatcggggtaaaacctgtagcaggatcaaaagagtggcgggaagcgtggcaaaaacgggcttttgctcacatttcaaatggttataaacatatttatatagcgattaattcgccagagatatttctgctggtttgttttctcatcagaatttaacactaaaagagcaggtaaaattatctgaatgttctttaagttattcataaagcaaattaataaatctgatgaatatgttaaccttcagcgacatcatcggtgaaaacctataaatgaagaaggaaagcaaaaaaatgaagaccattctacctgcagtattgtttgccgctttcgccaccacttccgcctgggcggcagaaagcgtccagccactggaaaaaatcgcaccttatccacaagctgaaaaaggcatgaagcgtcaggtgattcagttaactccgcaagaagatgaatctaccctgaaagtagaactgttaatcggtcagacgctggaagtcgactgcaatttgcatcgtctcggcgggaagctggaaagcaaaacgctggaaggctggggctatgattattatgtctttgataaagttagctcgccggtttccacgatgatggcctgcccggatggcaagaaagagaagaaatttgtcaccgcgtatctgggcgatgctggaatgctgcgttacaacagcaagctgccgatcgtggtgtatacgccagacaatgtggatgtgaagtaccgcgtctggaaggcggaagagaaaattgacaacgcggttgtccgctaaactgctgtgaagtgctgcaacctgtaggccgaataaggcggttacgccgcatccgacatctaacgcccgagccggttgcctgatgcgacgctgaagcgtcttatcagcatacgccacatccggcaaaccatgccggatgtggcacatcattacaacgcaatatccgccacttctttttgaacgagttgcggtttcaactgcggtttcggcgtactatctactgcctgcggcttgtcgtatttcagccccagcacttcgctggtgtactgcaactcgcgttctgttgccgctacatcaccgttcagcttgcgtccataagacggaacgatcgctttcaacgtagcctgccattgcgggctggaaacgcgatcgccaaatactttttccagcagattcaacataatcggcgcggcggttgacgcccctggcgatgcccccaggagcgcggcaatggtcccttgctggtcactgacgacttcagtacccagacgcagtacgccacctttatcggcatcacgcttgataatctgcacgcgctgccccgcttgccacaaacgccagtcctcttttttcgcctgcggatagtactctttcaacgcttcaaaacgatcctcttcactcaacatcacctgactcaccagatatttcaccagatcgaaattatccagcccgacgtgcatcatcggcatcacgttagaggtggtggtggaactcatcagatcccacaatgaaccgtttttgaggaatttagttgagaaggtggcaaatggcccaaacaacacgacgcgtttaccgtccagcacacgggtatcgatatgcggaaccgacatcggtggtgcgccaacggatgctttaccgtaaaccttcgccagatggtgattaaccacgtccggattttccgaaacaaggaactgtccgcccaccgggaaaccggcgtagtctttcgcttccggaatccccgattcctgtaacagcttcagcgccgcaccgcccgcgccgataaagacaaatttggcgcggatgttctgtgcagtgccatttttcagatcggcaacggtaacggtccaggtgttatcgtcattacgctttagggcgcggacttcgctgctgagttgcagcgaaaaattagatttcttctgcaaggaagcaattaactggcgggtgatctcgccatagttcacatcagtgccaatttccgtacgcgtggctgccactttctgttgcggatcgcgcccttccatcactaacggtgcccactctttgatctgcgcgtgatcttcagagtaacgcataccgcgaaacagcgagctttgttgcaacgcggcgtaacgggctcgcaggaaattaacgttatcctcgccccagacaaagctcatatgcggaacggtattgataaatgaacgcggtgtacgcagcacgccgcgctcgacctggtgcgcccagaactggcgcgaaatctgaaatgcttcgttaatggcgactgctttttcaatactgatgctgccatcggcgttttgcggggtgtagttcagttccatcagtgcagaatgcccggttccggcgttgttccagccgttcgaactctcctgcgcgacaccttccaggcgctccaccatggtcatcgaccattcaggctccagctcgcgtaaataggtccccaacgtggcgctcataatgccgccgccaatcaacagtacatcagtttcctgctcctcggacgctttcgcttttgccgccatcgaaacggcattaagccccacggccatcgagaagagcatggcagtcacttttttcatcttgttaatgccttacttttagtcgctttattgcaggtgagatttgcgcggcatcaacggtaacacttaagtaacaacatttaaataatgtttataaattatattctaattttagaaacattataatttcgttgattaattatagggttattagaaacgaaggtatttttagaatattgacctggcggcagcagtccgccaggtcagcgtcgaaatattatgccgtccgggcaacggcatcacgcgaagcagcatcgcgctcttcgcctgtcagctcgctaagttgcccgttgcgcatttccagcaggcggtcggcgtggataaagtaatgatcatcatgactgatggcgaaaatagttttacccatctcctgcatcagcggcagcagcacctgataaaactcacgacggaagtgtggatcctgatccgccgcccattcatccagcaggataatatcgcgttcttctgccagcgccagcaacagcgccacgcgttttttctgcccttttgataacttcaggttaacaatacgcccgttgcttaactcaagcttatgagccattttcagctgcgccagccacttctcaaccagttgcgggttagcgggttgcccctccggccccagcagttgatcaaacagccagacatcggtaaacactgccgaaaacagtttgcgataatcttccggttgttcgccgctgacaggtttgccatccagcaagatttcgccgctttgtggttggtacaagcccgtcagcaacatcgccagcgtcgattttccactaccgttgccaccaatcagaaacagcagttcaccacgtttgatggtgaggttaatcggcccaacggaaaacgcgttatcctgataagcaaacgtcacgttacgcagctccagcgtttgccagttgggaaaagcctgcgggcgcggaaactctgctttgaaaggcgcgagcgcgaatttgttcagcttgttaaacgccacctgcgccgtcagcagcgtcggcaatgcgccaaccgccgaaagcagcggcgtacgcaggaataacagcgtcaacgaataggtcgcagcaacgttggtatcagcccaaccgagactgttcgccatccagaacaccaggccgatagcgcccagcatcatgatgtttgaccagttcacggcactaagatggaaggtgtctgcgcgaataatatgatggcgatactcttgcgcatcaggaatgtagaggttgttaaacacatactcggcgcgttcacggttcagagtcagctctttgcgcccttcgagtacagtttgaaaatccgtgtacagcttatcttcggtttcacgcagggtcgccatatgtttgtacacccgcgccaccagcacaaaaccgccccagatggtgactgccatccagatagccgttaccagcaacattttgcccgacagcatccacaaatacgccgctgaaccgatagtgagaatgatcccctgcaccagttccggcagacgcacaaaagcaatggtgatattgcgcacatcgctggttaaccccgccagcaacgaagcgctaccaagttgttcaatgcgctcgacgtgggtatccagaatccgcttgataaattcactacgcagtcggtaaacgaagtgatgccccaaagtggtgagcgccagttgcgatccgagagtgactgccatcaacagcaacaataatcccagaaactccggcaacaccagcagactggtatccgccgtttcgataaggcgctgattgataaaagcaattaagccaatgcctaatgccgcactggcgaggcttagcgccatcacactgataaatggccagcgatactgccgccagacaagtacaagaagttccatgcagaaaacccggacaatgaattacagcccgcagtttaaacatcttcgcgcgcacagcaataataattcttatttttattcttttttacctgcctgacggaatgtcaggttgtagcggcagtcggtggtgagtggatgaaaccccgctttcaacggttgaataccgtgataaaacagccgcgattcaccgccccataccaccacatcgccatgttccagcaacaatctttttagcggatcatttcgtttcaggccgccaaattgaaaaatcgcgggtaagcccagagaaacagaaacaatcggcgcgcgcagatccggttcgtctttatcctgatgcagcgacagtttcgcgccaggagcgtagcggttgataagacaagcatctggctggaaatctggatagcccgccgccgtagccgcacgttgacataaattatgaaaactctgcggcatggcgggccacggtttatttgtttgcggatcaatgggcgaatagagataaccctgccgatgggtggtccagcccagacgcccgcagttggtcatcgccaccgacatggtatatccgcctggagtgaccatctggcgaaacggcgactggctggcaacgtcattaatatcgcggatcagttgctccgcagcgttaaaagcaaaacggtgcaaaatcaccgctccagccgccagtggttcttgccacggttcagcatcggcaaacagatccaacattacctctcctcattttcaacttcgcggcgcagcagttgcgctttgcgcgacacgccccagcggtaaccggaaagtgagccatcaccacggaccacccgatgacaaggtataacgatagcgagcttgttggcggcacaggcgctggcaacggcccgtaccgctttcggtttgccgatggcgttcgccagttgctgataactgacggtttcaccacaaggtatcgtgcgcagtgcctgccagacttgttgctgaaaagcagtgccgcgaatatccagcggtaacgtcagcggcgtatcgcgttgattgaggctggcgatcacttcacgcacatgttgctgaaacgtcagatcggcaggcgcgttgtcggcagcgggaaacatctgctgcaactcgctgattaatgtcgcatcatcatcgcccaacaatatcgcgcaaatcccccgctcgctttctgccaccaggcaacggcccagctcacaatcagccagcgcgtaacgcaccgccagattttcgccaccgtgacggaattgtttagccgtcatgcccagcgtttcatcggctttacggtagtaactgctgccgtcggggaatccggcactgagaatcgcctgagtcacgctctccccttttgccagagactcccgcaatcggcgagcacgccaggcctgctgccaggctttcggcgtcattccggtagtcgctttaaacaatctatgcaaatggaacggactcatcgccagctgttcggctaaggattccagcgttacaggcgtttcctgttccagcagtcggcaggcgtgggtgattttatcaaggcgatgttgttggggattggctttgtctggctgacaacgtttgcaggggcgaaagccagcggcaagcgcctcactggcatcggcatagaaagaaacgttttcccgcaaagcatgtctggcgcggcaagacggacggcaaaagatgcctgtggtgcgcacggcgaaaacgaattcgccgtcggcattcgggtcgcgggctaagacagattgccagcgttgatcgtcagttaagcatgtggcgtttttcataatcagctccctggttaaggatagcctttagtctgcccggtcaccatcacgcaaaaaccaacaatcttgcgctttaatttttttcgctgataaggaagcttttaaactgcggcgacatccaggttttaaagctatcgccctctttggtgatcatataaaccgccagcccttcccggcgaacgacttctttggctttctctggcccgagcaccattaagccagtatcccaggcgtcggcttccagcgccgtcggggcaatcaccgtcacggataccagattgtgttcgatgggacgcccggtttgcggatcgataacatgggaaaggcgtttgccgtccagttcgtaatagttacggtagctgccagaggtgctaatgccatgaccgttgatatccaccacggcctgaaccgcgttttctttatcggttggtttttgaatcgctacccgccacggctggccttcaccgttcatgccacggctgttcagcgcgccgcccaccgacaccagatagcgggaaatcccttcctgctccatcaagcgtgccagatgatccgccgcatagccttcgccgacagtggagagatcgacatataaatccggcaggtttttttgcagatattgctgatgcgactgattaatgaccgtcaggtgctgtaagccggttttggctttcatcgcatcgatctgttcctggctcggaatttgaaccggctgttgttccgggccaaagccccacagattcaccagcggcccgacggttatatccatcgcaccatcggtccttgcgccaatgcgcagcgaggtggtgacgatatcggccatcgcttcacttaccggccacggcgacaaactttgcgagtcgttaaagcgcatcagcgcggaatcttttttataggtcgaaagcagctgatcgtcggcgtccagctgggtctgaatcttttctttaagttcggcactgcgtttggcatcaatgcccgggatgctggcacgccagaaggtacccatggttttgccttcaagaacggtaacttcagtagcgtgggttttggcgggttgtggtttttgatcgcaaccaacaaagaagagcgcggcagccagcagtgccacgcgggtaaagcttatttccatacgtgattatcctcatgcgaacggtcgcaagagtacaccaaaaaactgtgtttgtacgctgaaaacaatgaaaaaagggcccgcaggccctttgttcgatataaatcgagattagaactggtaaaccagacccagagctacgatgtcatcagtgttgatgccagcagcgcgggtgaactggttgtcgtccagcaggttgattttgtagtcaacgtaggtggacatgtttttgttgaagtagtaggtagcaccaacatcaacatatttcaggatatcttcgtcgtcgtagttacgaccagcaacgacacccaggtttttacctttagactgcaggtatgctacagacggacgcagaccaaagtcgaactggtactgagcaacagcttcgaagttctgtgctttgttcgcccaacccagggaacctacgcgagttgcgttgtaggtctgggtgtactgagcagccaggtagatgttgttagcgtcgtatttcagaccaccagtgtaggtttcagcacggtcgccagtaccgatcaggccagtgttgttctgatcccaggtacgtttggagctggaaactgcagcaccaacgccgaagccttcgtaatcataagtgatagatccgccgacaccgtcgccgttctgacgcagagctttacgaccattgttggtgatgccatgaccagtgaaatccggatcattttcaccgcttacgctgccattctggccctggtactgaacagcaaagttcaggccgtcaaccagaccgaagaagtcggtgttacggtaggtcgcgaagccgttaccacgctgctgcatgaagttgtcagaaccgtaggtgtcgccaccgaattctggcagaacgtcggtccaggaagttacgtcgtaaacaacgccgtagttacgaccgtagtcgaaagaaccgatgtcctggaatttcagaccagcaaatgccacacgggtccaggagttgttttcgctttccggagcgttgccctggatctgatattcccactggccgtaaccggtcagctggtcagtaacctgagtttcacctttgaagccaagacgcatgtaggtctggtcgccatctacagacttgtcgtcagagaaatagtgcaggccgtctactttaccgtacagatctaatttgttgccgtctttattgtaaacttcagcagcgtttgctgcgcctgctaccagcagagctgggaccaggagggacagtactttaactttcatgttattaaccctctgttatatgcctttatttgcttttttatgccactgcatactgattaaccctcattaatcagtcggcaggtccattctccccaaaaatgcagaataatccaacacgaatatgatactaaaacttttaagatgtttcatttatcgctatagatgtttcaaaatgtaaatacaagggaactttttaagattattgcggaatggcgaaataagcacctaacatcaagcaataataattcaaggttaaaatcaataacttattcttaattatttgacagcactgaatgtcaaaacaaaaccttcactcgcaactagaatatcttccgctatcatcattaactttatttattaccgtcattcatttctgaatgtctgtttacccctatttcaaccggatgcctcgcatccggttttttttacccttctttacacacttttcattattctgtgctaccacagaaaaactataacgcctgttaactatttcacaaataattaacataggcataatttccagcaatcttcgtttatttgcaattaatatcgttaggctttttgtaggttatttgtacagcaaaatggcgcttgtacatctatttcacccaatgcaggatgataaatatcactggagaatagagaatcatcaatcaggtaagagtctggaatttcacactgtaccctttatactgccctatcacttcgcgaagttttaacaggtcataaacacgaatgcgtcagaaagagacaacggccacgacccgcttttcactcctaccggggagcattacccgcttctttttactgttgatcattgtgttactggtgacgatgggtgtaatggtacaaagcgccgttaacgcctggctgaaagataaaagttaccagattgtcgacattacccacgcaatccaaaagcgcgtcgatacctggcgttacgtgacctggcagatctacgacaacattgccgcgacgacctccccctcctccggcgaaggtttacaagagacgcgcctgaaacaggatgtctactatctggaaaaaccacgccgcaaaacggaagccttaatctttggctctcacgacaactcaacgcttgagatgactcaacggatgtccacctatctggacacattgtggggcgcagaaaatgtaccgtggtcgatgtattacctgaatggtcaggataacagtctggtgctgatctcaaccctgcccctcaaagatctcacctccggatttaaagaatcgaccgtcagcgacattgttgattcacgtcgtgcagagatgttgcaacaggccaacgccctcgatgaacgcgaaagtttttctaacatgcgccgcctggcctggcagaacggtcattactttaccttgcgtaccacgttcaaccagccgggacatctggcaacggtcgtggcttttgatctgccgattaatgatttgatcccaccgggtatgccgctggacagtttccgccttgagccagacgcgacggcaacgggaaacaatgaaaatgagaaagaagggacggatagcgtcagtatccactttaacagtacgaagattgaaatctcctcggcactcaactctaccgatatgcgcctggtctggcaggttccttacggcaccttactgctggatacgttgcaaaacattctgctgccactgctgctgaacatcggtttgctggcgctggcgttatttggctataccacattccgccatttctccagccgcagtacagaaagcgtccccagcacggcggtcaataacgaattgcgcattttacgggcaattaatgaagagatagtctcactgctgccgctcggcctgctggttcacgatcaggaatcgaaccgcacagtcataagtaacaaaattgccgatcatttgctgccgcatttgaatctgcaaaacatcaccaccatggcggaacagcatcaggggattattcaggcgacgatcaataacgagctgtatgagatccgcatgtttcgcagccaggttgcgccgcgcacacaaattttcattattcgcgatcaggatcgcgaagtgctggtaaacaagaaactcaagcaggcgcagcgtctgtatgagaaaaaccagcaggggcggatgacctttatgaaaaacattggcgatgcgctgaaagaacccgcacagtccctggcggagagcgcggctaaactcaacgccccggaaggcaaacaactggcgaatcaggcagatgtgctggtgcggctggtcgatgaaatacagttagcgaacatgcttgcggacgatagctggaaaagtgagacggagctgttctccgtgcaggatttaattgatgaagttgtgccttcagtgttgcctgccatcaagcgtaaaggtctgcaactgctgattaacaatcatctgaaagcacacgatatgcgccgcggcgatcgcgatgccttacgacgtattttgctgctactgatgcaatatgccgtgacctcaacgcaattgggaaaaatcacccttgaggttgatcaggatgagtcctccgaagaccgcctgacgttccgcattctggacactggagaaggcgtaagcattcatgaaatggataatttgcacttcccgtttatcaaccagacccaaaacgatcgctatggcaaggcggacccgctggcattctggctgagcgatcaactggcgcgtaaactgggcggtcatttaaacatcaaaacgcgggatgggcttggtacacgctactctgtgcatatcaaaatgctcgcagctgacccggaagttgaagaggaagaagagcgattactggatgatgtctgcgtaatggtggatgttacttcggcagaaattcggaatattgtcactcgccagttagaaaattggggtgcaacctgtatcacacccgatgaaagattaattagtcaagattatgatatctttttaacggataatccgtctaatcttactgcctctggcttgcttttaagcgatgatgagtctggcgtacgggaaattgggcctggtcaattgtgcgtcaatttcaatatgagcaacgctatgcaggaagcggtcttacaattaattgaagtgcaactggcgcaggaagaggtgacagaatcgcctctgggcggagatgaaaatgcgcaactccatgccagcggctattatgcgctctttgtagacacagtaccggatgatgttaagaggctatatactgaagcagcaaccagtgactttgctgcgttagcccaaacggctcatcgtcttaaaggcgtatttgccatgctaaatctggtacccggcaagcagttatgtgaaacgctggaacatctgattcgtgagaaggatgttccaggaatagaaaaatacatcagcgacattgacagttatgtcaagagcttgctgtagcaaggtagcctattacatgaacaatatgaacgtaattattgccgatgaccatccgatagtcttgttcggtattcgcaaatcacttgagcaaattgagtgggtgaatgttgtcggcgaatttgaagactctacagcactgatcaacaacttgccgaaactggatgcacatgtgttgattaccgatctctccatgcctggcgataagtacggcgatggcattaccttaatcaagtacatcaagcgccatttcccaagcctgtcgatcattgttctgaccatgaacaacaacccggcgattcttagtgcggtattggatctggatatcgaagggatcgtgctgaaacaaggtgcaccgaccgatttgccgaaggctctcgccgcgctgcagaaagggaagaaatttaccccggaaagcgtttctcgcctgttggaaaaaatcagtgctggtggttacggtgacaagcgtctctcgccaaaagagagtgaagttctgcgcctgtttgcggaaggcttcctggtgaccgagatcgctaaaaagctgaaccgcagtattaaaaccatcagtagccagaagaaatctgcgatgatgaagctgggtgtcgagaacgatattgctctgctgaattatctctcttctgtgacgttaagtccggcagataaagactaatcacctgtaggccagataagacgcgtcagtgtcttatctggcatttgcacggattgccggatgcggcgtaaacgccttatccgtcctacgattcccgcgatttcctgaccctctcggcatataccgtcagcgtctgttttatcacatccagcgttaccggcttcgacaggcagctgtccataccggactccagacaccgctgcttctcttcagccaacgcattagcagttactccgattaccggcaacgtcagtcccaactgacgaatgcgttgcgtcaagcggtaaccatccatatttggcatattgacgtcgctaagcacgatatcaatatgattcttgttaagtacattaagcgcatcgacgccatcattcgcggttttacattgatagcccaacgatcccaactgatctgccagcagacgccggttaatcggatgatcatccacgaccagaatcatcatatcgtcattatcgctgaccgctttgtccgtcgacggcagagcgttagcaggatcgtcgctctccatctcgatcaaataaatacgcgccaacaatgccggtagctcatgcggagcagccacactgtgtacccactcccctggcgctttctccagcggaataccaatatggcgacgacagaaggtcactaccgctctgccctgccattttttgttcactacctcgtcagtaattaacacatcttcgggagtcggttcctgcccttcgtatgttgtaacgacgatgccgctgcgctgcaaactggtttccaggaactgacagagcgacgcattgcggaccgccagccagcagcgtttaccactcaacccttccacaccttttttctgcgggtactgagcgccatacaacggaatacgcacggtaaactggctgcccattcccggttctgaatctaccgagatgtcgccgtccatcatgctgatcagtttttcacaaatcgccagacccagaccagtcccctggaagttacgctgtacgcccgttccgacctggaagaagggatcaaacaaacgcaccacttcttttgccggaatccccacgccggtatcgcgaacacggatagagagataatcgccatcagcgcgaacatgcaaaactatacagccggtatcggtgaattttatggcgttactcagcaggttagagatgacctgttgtaaacgcatcgggtcgccatttaaggccactggcacatccggttcaataaagcagtacaagcctaactgcttgcgtaccaccagcggtaaatagttggcggtgatgtggttcatcacttcacgcggtgaaaactcacgcggttcgatcttcaactgttctgattcaattttcgagaaatcgagaatatcgctgataattttcaacaacaggctggaagagttgttcattgccgtcaccagacgatcgacgcctttcggtaactctttggtttgcaacagatccaggttaccgataatgccatacagcggcgttcgcagctcatgactgacggtggccaggaacatcgattttgactggctcgcctgttccgctgcttgtgccatctcctgcaacgactcttccatcttcacgcgcgaagaaacatccaccagcacacaaatggccacgttttcattacgatagcgcgaatggacgaagctgatttgcagattggtattgttgctggtcaggacatcaacaaaattgacctgctgcccacagataatttgtgtcagccgttggcggtcctcatgcgtaagcatattgagataggtatgcgccagttcgttacttaaaatattgacgccatcagcggtacgcaaaatgcagatacccactggcgcggaggcgacaatcttgcgattaaattgctcatgttcttccagtcgcagggcgtcgctttccgccggaatgaaaatacgccgctcgtacatccgcgcgagagtaaacaatgcagctccggcaagcacattcagcaaaattgcgttaaggatcaacatgcgaatgcgttccagcaccttatcaactggcactgaataaacgatgcttagcgatgagggtggcagatttttcttcagcaccagttcccggaacccttccgtatagccaaaccaggagcgttcctgcatccagcgaggatcgcccttaattttgctttctggtccggtaagcgaaatcagggtatgaccattttcatcaagaatggtaacccccatcggcaacgtaccaggtaagaaaaagttctccatccggatggtttgctcgacacccaaaagcgcctgcaaccggttcgccagataaactggcgtcaaggcgtaaaaatacccgacgccagggcgcggaccttcgctgatccagtagaggttactgccactatcatcttgtggtgcatttcgatatttattaatgcgttcatgcaaagcttttagcgcggtatcgcgttccactggcatatcacgcagaccgaaattggccatgcagaggttatcgctgccgattaaaaatacccggtttagatcgtaagccgcagaaaaattatcgcgccagtagcgcataaaccacgccaatgactccagagaacctcgccaggtgttactcattgcggaacaatcagagtcagcaaacagcggttcaaacgcaggcacatccgtctgcgtttctcgtccacgcggggaaagcacaccgttttctgccgataagcgattttcagctatgtacttcagctctttcatcacatcagaggtgcgttgaataaagcgctgagcctgatcggaactcagattaaattcctgacgaatttccgattctcgctgatgtaacgcattaacgatgtaaaaaacggatgaaaaagcaatcaacagccagagcactaacgccaatgctctgaacatgtagcgcgaggctttcagggttgtacgaaaagaagcaaggtatttcaaaggggcgaagctccgcctcaggtgaccgatggagtgtggttaaggtagcggtaaaagcgtgttaccgcaatgttctctcttctctggaatatgatacaccgccgagaaatcatcaccttaacctctgataatcgtcatataccggacaagactagtggatttcagcatgcattatatgaagtggatttatccacgccgcttacgcaatcaaatgatcctgatggcaatcctgatggtcattgtcccaacgcttactattggttatatcgtagaaacggaaggacgttcagcagtcttatctgaaaaagagaaaaaactttctgccgtggtcaacctgcttaatcaggcgctaggcaatcgctacgatctctacatcgacttaccgcgtgaggagcgtatccgcgcattaaatgcagaacttgcccccattaccgaaaatatcactcacgccttccctggcatcggcgctggttattacaacaaaacgctggatgcgataatcacctacgcgccttcagcgctatatcagaataatgtgggcgttaccattgccgcagatcaccctggtcgcgaagtcatgcgtacaaatacccctttggtttattcaggcaggcaggtgcgcggcgatattttgaattcaatgattcccattgagcgtaatggtgaaatcctcggctatatctgggccaatgaattaaccgaagatattcgtcgccaggcctggaaaatggatgcgaggattatcattgtgctcaccgccggtttgctgataagcctgctgttgattgtccttttctcccgtcgcctgagcgccaatatagatatcatcaccgatggcctctcgactctggctcaaaatattcccactcgattaccacaattgcccggtgaaatggggcaaatcagtcagagtgttaacaacctcgcccaggcactgcgtgaaacgcgaacacttaacgatctgattattgaaaacgctgccgatggcgtcattgccattgaccgccagggtgatgtaaccaccatgaacccagcagcagaagtcatcactggctatcaacgtcatgaactggtagggcagccttactccatgttgttcgacaatactcagttctacagtcccgtactggatacgctggaacatggcaccgaacatgtagcgttggagatcagttttccaggccgtgaccgcaccattgaactcagtgtcacgaccagtcgtattcataacacgcacggtgaaatgataggtgctttggtgattttctctgatttaactgcccgcaaagaaacccagcgccgcatggcgcaagcagaacgcctcgccacactgggtgagctgatggctggcgtggcgcatgaagtacgtaatccgttaacggctattcgtggttatgtacagatcttgcgccaacaaacccgtgacccaatacatcaggaatatctgtccgtagtactcaaagaaatcgattcaattaacaaagttattcagcaattgctcgaattttcacgcccacgccacagtcaatggcaacaagtcagcctcaatgcattggttgaagaaactctggtactggtacaaaccgccggcgtacaagcgcgggtcgacttcataagcgaactggataatgaattaagcccgattaacgccgatcgtgaactgctcaaacaggtactactgaatatcctgatcaatgccgtccaggctatcagtgcacgagggaaaattcgtattcgaacctggcagtatagcgactcgcaacaggccatttcgatagaggacaacggcagtggcattgatctctcgctgcaaaaaaagatcttcgatccctttttcactaccaaagcctcaggaaccgggcttggtctggcgttaagtcaacgcatcattaatgcccatcagggtgatattcgcgtcgccagtttgccgggctacggcgcaaccttcacgcttattttaccgatcaacccgcagggaaatcagactgtatgactgctattaatcgcatccttattgtggatgatgaagataatgttcgccgtatgctgagcaccgcttttgcactacaaggattcgaaacacattgtgcgaacaacgggcgcacagcattacacctgtttgccgatattcaccctgacgtggtgttgatggatatccgcatgccagagatggacggcatcaaggcactaaaggagatgcgcagccatgagacccggacacccgttattctgatgacggcctatgctgaagtggaaaccgccgtcgaagcactacgctgcggagccttcgactatgttatcaaaccgtttgatctcgatgagttgaatttaatcgttcagcgcgctttacaactccagtcaatgaaaaaagagatccgtcatctgcaccaggcactgagcaccagctggcaatgggggcacattctcaccaacagcccggcgatgatggacatctgcaaagacaccgccaaaattgccctttctcaggccagcgtcttgattagcggtgaaagcggcaccgggaaagagttgattgccagagcgattcactacaattcgcggcgggcaaaggggccgttcattaaagtcaactgcgcggcactgccggaatcgttgctcgaaagtgaactgtttggtcatgaaaaaggtgcatttactggtgcacaaaccttgcgtcagggattatttgaacgtgccaacgaaggtactctgctcctcgacgaaattggcgaaatgccgctggtactgcaagccaaattactacgcattctgcaggaacgggaatttgaacggattggcggccatcagaccataaaagttgatatccgcatcattgctgccaccaaccgcgacttgcaggcaatggtgaaagaaggcaccttccgtgaagatctcttttatcgccttaacgttattcatttaatactgccgcctctgcgcgatcgccgggaagatatttccctgttagctaatcactttttgcaaaaattcagtagtgagaatcagcgcgatattatcgacatcgatccgatggcaatgtcactgcttaccgcctggtcatggccgggaaatattcgagagctttccaacgttattgaacgcgccgtcgtgatgaattcaggcccgatcattttttctgaggatcttccgccgcagattcgtcagccagtctgtaatgctggtgaagcaaaaacagcccctgtcggtgagcgtaatttaaaagaggaaattaaacgcgtcgaaaaacgcatcattatggaagtgctggaacaacaagaaggaaaccgaacccgcactgctttaatgctgggcatcagtcgccgtgcattgatgtataaactccaggaatacggtatcgatccggcggatgtataacgccaaaacttgctatgcagaaatttgcacagtgcgcaattttctgcatagccgctcattctccttatgaatccccatctaatttatccttttctattcaattagttaaataacaacattcaataatctcattctggcactccccttgctattccctgactgtacccacaacggtgtatgcaagagggataaaaaatgaaaacaaaattgatgacattacaagacgccaccggcttctttcgtgacggcatgaccatcatggtgggcggatttatggggattggcactccatcccgcctggttgaagcattactggaatctggtgttcgcgacctgacattgatagccaatgataccgcgtttgttgataccggcatcggtccgctcatcgtcaatggtcgagtccgcaaagtgattgcttcacatatcggcaccaacccggaaacaggtcggcgcatgatatctggtgagatggacgtcgttctggtgccgcaaggtacgctaatcgagcaaattcgctgtggtggagctggacttggtggttttctcaccccaactggtgtcggcaccgtcgtagaggaaggcaaacagacactgacactcgacggtaaaacctggctgctcgaacgcccgctgcgcgccgacctggcgctaattcgcgctcatcgttgcgacacacttggcaacctgacctatcaccttagcgcccgcaactttaaccccctgatagcccttgcggctgatatcacgctggtagagccggatgaactggtcgaaaccggcgagctgcaacctgaccatattgtcacacctggtgccgttatcgaccacatcatcgtttcacaggagagcaaataatggatgcgaaacaacgtattgcgcgccgtgtggcgcaagagcttcgtgatggtgacatcgttaacttaggaatcggtttacccacaatggtcgccaattatttaccggagggtattcatatcactctgcaatcggaaaacggcttcctcggtttaggcccggtcacaacagcgcatcccgatctggtgaacgctggcggacaaccgtgcggcattttacccggtgcagccatgtttgatagcgccatgtcatttgcgctaatccgtggcggtcatattgatgcctgcgtgctcggcggtttgcaagtagacgaagaagcaaacctcgcgaactgggtagtgcctgggaaaatggtgcccggtatgggtggcgcgatggatctggtgaccgggtcgcgcaaagtgatcatcgccatggaacattgcgccaaagatggttcagcaaaaattttgcgccgctgcaccatgccactcactgcgcaacatgcggtgcatatgctggttactgaactggctgtctttcgttttattgacggcaaaatgtggctcaccgaaattgccgacgggtgtgatttagccaccgtgcgtgccaaaacagaagctcggtttgaagtcgctgccgatctgaatacgcaacggggtgatttatgattggtcgcatatcgcgttttatgacgcgttttgtcagccggtggcttcccgatccactgatctttgccatgttgctgacattgctaacattcgtgatcgcgctttggttaacaccacaaacgccgatcagcatggtgaaaatgtggggtgacggtttctggaacttgctggcgtttggtatgcagatggcgcttatcatcgttaccggtcatgcccttgccagctccgcgccggtgaaaagtttgctgcgtactgccgcctccgccgcaaagacgcccgtacagggcgtcatgctggttactttcttcggttcagttgcttgtgtcatcaactggggatttggtttggttgtcggtgcaatgttcgcccgtgaagtcgcccggcgagtacccggttctgattatccgttgctcattgcctgcgcctacattggttttctcacctggggtggcggtttctctggctcaatgcctctgttggctgcaacaccgggcaacccggttgagcatatcgccgggctgatcccggtgggcgatactctgttcagtggttttaatattttcatcactgtggcgttgattgtggtgatgccatttatcacccgcatgatgatgccaaaaccgtctgacgtggtgagtatcgatccgaaactactcatggaagaggctgattttcaaaagcaactaccgaaagatgctccaccgtccgagcgactggaagaaagccgtattctgacgttgatcatcggcgcactcggtatcgcttacctggcgatgtacttcagcgaacatggcttcaacatcaccatcaataccgtcaacctgatgtttatgattgcgggtctgctgctacataaaacgccaatggcttatatgcgtgctatcagcgcggcagcacgcagtaccgccggtattctggtgcaattccccttctacgcggggatccaactgatgatggagcactccggtctgggcggactcattaccgaattcttcatcaatgttgcgaacaaagacaccttcccggtcatgaccttttttagttctgcactgattaacttcgccgttccgtctggcggcgggcactgggttattcaggggccgttcgtgatgcccgcagcccaggcgctgggcgctgatctcggtaaatcggtaatggcgatcgcctacggcgagcaatggatgaacatggcacaaccgttctgggcgctgccagcactggcaatcgccggactcggtgtccgcgacatcatgggctattgcatcactgccctgctcttctccggcgtcattttcgtcattggtttaacgctgttctgacggcaaccctacagacagaaggaatataaaatgaaaaattgtgtcatcgtcagtgcggtacgtactgctatcggtagttttaacggttcactcgcttccaccagcaccatcgacctgggggcgacagtaattaaagccgccattgaacgtgcaaaaatcgattcactacacgttgatgaagtgattatgggtaacgtgctacaagccgggctggggcaaaatccggcgcgtcaggcactgttaaaaagcggactggccgaaacagtgtgcggattcacggtcaataaagtgtgtggttcgggtcttaaaagtgtggcgcttgccgcccaggcaattcaggcaggtcaggcgcagagcattgtggcggggggtatggaaaatatgagtttagcgccctacttactcgatgcaaaagcacgctctggttatcgtcttggagacggacaggtttatgacgtaatcctgcgcgatggtctgatgtgcgccacccatggttatcatatggggattaccgccgaaaacgtggctaaagagtacggaattacccgtgaaatgcaggatgaactggcgctacattcacagcgtaaagcggcagccgcaattgagtccggtgcttttacagccgaaatcgtcccggtaaatgttgtcactcggaagaaaaccttcgtcttcagtcaagacgaattcccgaaagcggattctacggctgaagcgttaggcgcattgcgcccggccttcgataaagcaggaacagtcaccgccgggaacgcgtctggcattaacgacggtgctgccgctctggtgattatggaagaatcttcggcgctggcagcaggccttacccccctggctcgcattaaaagttatgccagcggtggcgtgccccccgcattgatgggtatggggccagtacctgccacgcaaaaagcgttacaactggcggggctgcaactggcggatattgatctcattgaggctaatgaagcatttgctgcacagttccttgccgttgggaaaaccctgggctttgagcctgagaaagtgaatgtcaacggcggggccatcgcgctggggcatcctatcggtgccagtggtgctcgtattctggtcacactattacatgcaatgcaggcacgcgataaaacgctggggctggcaacactgtgcattggtggcggccagggaattgcgatggtgattgaacgattgaattaacatgtaaaaacgcccgatagcgaaagtcatcgggcgttttcttgaacattgacagtaaagataacctcattaatcaccagtcaaaacttttcaccagcgtcagttcgccagcattacgcatcggtacaataaaagtttcctgtttctcattgaccgacccttcatcggtgatcagcgtcagttgggccgtagttaattccgtttcgctgcgtccgccatagtagttgatatacacctgataacggccgtgaactggcgctggcatggcgaaaatctcggggccgtaccctgtcgtgacatccatatccagtgcaccactgtttttcagcacggtgttaccgtaccaggcatattcaccgtcaggcgtaacgacatgaagatcgaggtcggtattgtccgtatcccacgagagaaccagccgtaaacgtgcgcgaatcgccccagcacccggcgttgagtaaaactgcattttttgtcggctttgcccatctgggctgatgacctgcacgctgttgctgccttcagtgaaaatataagggcgtgcaaaagaaccatctgattcaattctctgcggcatactggcaccgttgaccaccagccggccctgctgaactttacccgccgcagcataattctttattttgccgcggatctgcgctgagatattttgatcatctgccatgttgacggacgacgccgggtaattgatcgtttgtgaaaaactggcatcttcaccctctgccggatgccagccagagagcggtgcatcaatctcgacttcctgcacaccttcactgtgagcgacaggcgaaagcgccaccagtaacaacggaagaaaaatctttcgcatagcattagtccattaataattgtcgggtcagcgtttcgatatagttctcatcaagcccggtgggataaccatcaaaggccaggtgcagatactcatgggttaaatccagccgatcctgaagcgtaaagaagttacgaataaacagccgtttctgctgccgatcggtataggggaaacctgagactaaacgacagaccgcaaacacgtctggttcgttgtatcccgtctcaccttgtaatatacgccgccactgcggcatttttttcgccagccaggctttcgctttgggtaataactggcaggttgagcgtggcgctccccagcggctaaggttgttgtcgggataagcaaacgcaagtatctgatcataacgctctccctgccccgcctgggcagtagcgtgccgccaggaaagcgtcccttcggtaacccggctgccatgataatgaaccggatcgcccgcatagatgagatcctgcgtccaggcggtcatcgttcgcgcccccgtggtagctggcgaagccgaaacacgctgtgtggcgctgctgtcagggatggtcaggcaatcgccttcccgattggcgttttgctgtaagaaagtgcgaatcgccacggtcatagctttcgctgcctcagggggcgtacttttcgcctcgcgatccagaactctggcaacgtactcttcacgatcgagatgcgactgcaatttcagtttgccctttaccgtcagtaacgttgtctcaccgtggctgacaaatgtcatgtggttaccattggcaaacgtcacacgatagcgcccattgagcacgcctggtttgaatgccgtcgtactcttttcctcagtaactttcttcagcggataacgagcaaacagatccaccagcacacattgcccactggcaacttgcgtcggcactggcaaaacccgattaagcaccgtcgcataacgggttagtaccgttttgctggtgccactgccagtagcccacagcggtgtaccatcggttaaccagccagcaaaaccaccctgacggatttcctgcttatcatcggcaaaccagctccaggttttcacccgtacccgactaccgagcatggatgcgacatcgattttcgcctcgtccagcaccacatccagtaagacttcctgagctttgttttgcgcgggtaacgtcgctaaagaatcaagcagcgatttaaccgttaccgaggtttctggcttcagcgtagtaagagacgctaaccacgcaggtgcctgacgctgttgccagtattgcccccacacatctgcgccaatatgcaaccgctgcggcgcaaaatagagtccacaggagcgtaccagcgcggtatcgcgcgttatgctctccccagcctgacaacaataaacctcttccggggagtttccgcgacactggtagggctgctccggttgatgggtatcctccagccaggcgtaaacatacagtttccacaaactccctaatggcgtggtgagcgtgtcaggtaatgccgagactttggtcacgcctgatgacgacagctgatacagttgatcgtgttgcgcgccccgcagcgccagttgtaacggcgtctcctccgcaagcgttggcagagtaaccaacgccaatagccagacgattctgcgccagttcacttatttcacctgcatcccggtccattcactccctggcgcaacactttgctgtgcaggtgcataggaacgcacataacgagcaggaggcagaacgaattgccctttttgcgagaagcgcagcaaatggcggaaagtgaccgttcccgtcagttctttcaccggcaacatataggccagttcgcccatttcattacgcgctttttccagcaattgcccctgctgttttccagcgttaggtttattgaccgaaatgccccacgttgtccgctcaacgtcggctcccggcgggagcggtacttccacctgaccatagcgcagaactgcatcctgctcgctggtaagcataatttcatcgagatacagcgcatcgctgtcaatctcattgctggtcaccggctgcagagtaaagctcatctcttcttcaccggggataagccgatacaactggcgttcaacggtcaccggaatgttactttgttgagccgtttttgccggttcacgccagcggacctgcacattttgcggcgacaattcatcaccaaaagagagaatgtccggcacgccctgaccaacccaacgccagtattcgcctcctccggttaacttatgtttggcccatgcgcccgcaggcgcaggcaacacaactggaggcattgtcgccatatatttcgccagccagttcatggccaacgcgcgctcaatggtggattgctcagcggttaaaccacttaaaatagcggccgcctgggtagcgtcgcctccactattgagcagcacaaccgtgtgcgccagcggttggttgctgtttgctgctttatcccacgcatattgctgaacctgtggcatcacagtggacttcaactgcgcttttttcagcaacgtcatggttaagacgtttgccaccgcatctgccagtggagattcaggtgtatcgaggatcaggctgtcattgatatcgctggtgtcttcctcagagaaatcttcagttttagttccgcgccgggcgatagcttcatccaaccctttcaacaacgttttgcacggcagattcatctcctgtgcccacgccagcaccagcgcccgatgcaataacggcatgttgtccgcctgctcggcataactgtcgagcatatgttgccagtattccggttgctgcgttacgccgagcgcctggctggcctgccagtcggcgtaccatgcccatgccgtgaggaaggcgtcgccattgccatcttcaccccaccaggtaaagcgcactccgggccccgccagttgcatcagccgcagacggttatcctgaatcatctgacgaatgtcgttagcggcggcactttgatgatcggcaagcgaacgccaggcgagactgagcgggatcagacggctaccggtgttgatcacgccaccccacggttcatcgactaatgcatcaagattgttacggaaaatctcctgcggcgtttcgctactttgtagccggatattgctcgcctgctcgggcaacgtcagcgcattatcgccaccgccgagcatgacgtttttctgttgttcaacgggccagctgttatccacaaaagacagttttgtgctaatgctgtcctgtacttgcccattttgttgcagttctgcacttaacaagccagattgctgaatattctgcgtcagcgaaatataattcgcccctttgtgcagcgtcagcgtctggcgcatctcagcacctgcaaatttagtcaccagcgccaccggttcgttatcctgctgactgaagataaacagtcctgccgccggtttgtcgcccatgcgatacaccgttggcatactccatttcatgtagagacttttttccgaacgcagataagcacgcccctgcccgaccagcccgtcgccgttcatcccacgcgcggtgatgcgccagcgggttaacgaatcaggcatcaggaacgtgaaatacgctttgccttgtttatcggttgtgagtgacggcatccaggccgcggtatccacctcttcacgccgtggacgttcaagcatttttactcgccgctcgctgcggttagtcgcgccaggcgcaaccggctcgctggagagcgcctgatcgtagctgataaatgacaggctggagctggtacgcacattgttacgccccagcggatagaaaaatttgccgatattcggcgcgatttccggttgcagcgcgtagatcatttcatcgaccacacctaccgttaactgcgcagaaacaggtttacctttcagcgacgaggttaattcgacattgaccagttcaccaggctggtaatgggttttgtccgttttcacccggatatccagctggggaacggcaactttaatcccggcgttctgaaaactgtactgaccgttacgggtatacagcaccgaaaaagtgatgttaggcgcaaaggaattgctcaccggtacgcgggcttcatactgggtatcgtttaaacgttgtagcgttagccagtttgccggatgcgatagcagcgactgctgttccacgcgatcgcgttccagcgtcaataatgcttcatcaattggctccgggaaggtaatcagcatcttcgcggtttcgccaggctggtacagcgttttatctgccacgatatctaccgtaccagtatgcgacgtgctgcccttaccgctgactgcatggcttaacccggcgagaattaagccgtctttatcgcgtaatgtcagattgtagttgccaggtttagcgaaattgacggtaaaggatttgccgcctgacggtagctctccgctgtggctcgtgcggtcttcgagacgcaaccattcatacgtaacaggaacctgttttgaagattccagcgcggcataacggaacacaaccagctcgccgctattactgtattgtgcggcggtacttaaagagtaatgcgccaggccacgttcaatgaggatctctttggtggtggtaactcgatacgccgcgccgtcactggcggagacggttaacaaataacggctcggtttatcggcggcggggagattcaacgccacatgaccattatcgtcggaaaccgtttcactgccttccagcgacaccgggaaacgtcctgcataacgcaaatcgttaccaaccattgataattgctgagcgcgcaaacttaactgcacgcgggcattttttaccggctcgccatccgggtagagcagttgcagtttgccgctgaccgcttcgccagttttgaactcttttttatcgagagctaaaccaatctcaaaatggggtttgatgtagtttgccacgcgaaaactgctgctatagacctgtttgcggtaagcaagacgtaactcataacctccggcgacggcattttctggcaggcggaaactcccctgcccgccattacgcgcatccagcgtgacattgacggtttgcaacagactgccgttggcgtccagcaccgaaagcttcgccggtgcgctgacgatgggggatgaatgcaacggatcgtggaactcgcggcccatcactttaacatcgacacgatcgcctgcgcgatatagcgggcgatcggtaaagatatacaagcgggtgttgtagatttcgctttcgtagaaaaagttctcggagacaaaaacgccgccttcagcatccttacccagaatatatgaacgttctggcgatatatgttgtaactgcaaggtaccgctgccatcggtcacaccgcgggtcatcacgccaagaccgtcagtccacaagatctctgagccggtcttcgcttcaccctgttttttccccgcggtccacaccagaagctcgttacctgacactttgctaagcgccactgtatcggaaacaaacaccaccgtcgtcgcccgatacccacccactatcgcctcgacgaggtacagtcccggctcttgtttgccgagaggaatatagatgttgcccggctgcggcgaaatgaaattgctggatgcgccttccagttttaccccttgttgcggctcgaccggtttagcctgccatagtgggtaacggaactgttccactagtggatattttttcagcggtgaaaactggttgttctgtacataacgggaaggcttaataatggcattgccgagctgtaattcgggtaacgcctgagtcacattctgccgtgactgagaagagaaagtacgctgcatcacgcggcgagatttgccgtaccagttatcccacagccaggtcagcgtattgttcagtccgtcgcccagatattgcggttgcaccacaatgcgatgcaggtttttctgctggcgcaaaaatgccatcgggtcaggaatacgatacaggcgaacgtccacgccgccgtactcttccatctgatagcgccgataatcacgccccggcgcttccagtcgcactttcgcctcttcactgctgctaaaactgctgtcagcgagcaaaaagaatgttcccccggcgggcggcacatagttactggaaggaagcgaatcatcagcattagcaagccctgttcccacaagagacagggacaagcacgctgctatcgcgccagaaaatttaaacgataaatgccaatgaaattgggattggaatcgttgggtatccatcgggtgtccttccatgtcataagttgttgcagactgactgcgcgcattccgttgtcagttttcgtggcgcttccggtgtggtagatgatgtaacgccccatccagaccattaagtgctgggcatcgccctgatcgaaaaaaatcatatcgccaggcagtgcctggtttatgtcctggccaataaactggctgttgtactgaatcaaattaatcgcggtcacataggggccggttttcccattcccctgattccagttttgcgccagttgacgctgttcaggtgttagcgtcatctctggcggcaaatactggttagataaaccgttactttttagccatttactgtcgtgaactttcagcgcctcgttcgccgcaaatcgcaccaggcccgcgcaatcctgttgataccagcgtgggcttggcccctggcggagctgttcctgtgcaatgcgcacaaaccacgcgcgaaacagcccggattgttcgacatttagcatttcactatgggcaacaacacaatacagccagcaaatcagcaccagcagcccgtgtctcatagcggttgccaggttatgggtagccactgccaggcggcaccgggttccatctgggccagcttcatgacataacgcggttgttgagataaagcgtccagcttcggcattaataaagtttgtgcggcgttataaaaaaccggttcgagattcttcggcagactggtcagcgtttcgttacgcagcagtttcgccattccttgtggattgatatagagcggaacgatgccatcagtgggtattacatccaccattgccgggcgggttttattcagtgcttgcagggcgttattaaccagcgtgtcatcgagggagaaaagcagcgttttgttttgcatcgccagcgacacgcggaaaaaataatccgacattaattgatcgggttgcgccgcctgcgctttcggatactgaccgtatcgggaactcacttcgcgacgccagatttgcgcttcgccctgctgagtctggcttaccggcaaaacaccttctggcgctttgctttcgtgcgcaccaatattttgcgtaaacagtttccctggcaattgcgcctgttcggcagtgccatcaaactgaccaacaaatagcggggtttgtaattttgagtcttcataccagcaccgcccggcgccaccgtctaacgccccattcagcttgtcgttttcctggctgatgtgcgaaagcatctcttcggcaataccgtgtgaatacggcaccgccacacagaagctggctccggcaggcatactgttccataccggcgtaaaatcgaaactggcatctacgctggcggattcatcatttaacgccacaaagctatgccagccgtcgttacccatttcgaagcgcacgccagcaaaagaaggcattaatcgctggtagccaaaccccagcaacctggcgctgactacgatgcgctggcgtactggcgttttttcggcagtacgcgcttccaggccaaagcgggtttcccagcgttttttaccactcaacaaatcacttgcgatcgccgtagcttcggtatcctgttggtcatctttaaacagcatatccgaactggaaaacgccaatattttgtcctgataagtcgcaaacatcaggacgttattgccgttatagcgcaactgataaacaggaatagtttcactatttatcttgatgctactgatttccgtcttgcttaactggctgtcgctggtagcggcaaacaacaatggctccagcagtttgcttaaaccactgcgctggataagcaccatataatgtgaaagatgaccttgtttatcatgccacagtgccgcctgcgcgggctggtctaagagtgacgaaaagagcttatctttcagcgtgagatcgtgttcatagacaatgcggcgaatgctgccttcaatgcccagacgatcggcatgattctgataatagaaaacgaaatcttcgctcagaacatcgtggagaaacggaatggtaaggagatctttgggaagctggctcagagagtcgctgtcgagaaagaggtccggctcattgagatcgatttgcagattgttgtgcaccaccagtggcgacaacgttttttttggcccactgccagcatattgcaacgcccatacgccagcggatagcagcgctattgccccaaaaccaacaaggccataaaaccgccagcctttcgcctttttttcaccactcattgccacattccttgtgtatagccagccattttttacgggcacagccaaactttaccgcgccctaatacgacaaaagcccagactttacagcctggacttttcaattcaaaaaagggagatggctcccttttggcatgaagcgatgaaattattcttcttctggctcgtcgtcaacgtccacttccggagcgatttcatcgtccccttccgcggcactgccgtcgatggtatccagatcttcctcgtcaaccggttcagcaacacgttgcagacccaccacgttttcatcttccgaagtacggataaggattacgccctgggtgttacggcctacgatgctgatttccgaaacgcgagtacgtaccagcgtaccggcatcggtgatcatcatgatctggtcgcagtcatctacctgcaccgcgccaaccactaaaccgttacgttcggtaaccttgatggagataacccctttcgtcgcacgcgacttggttgggtattccgccactgcggtacgtttaccataaccgttctgcgttgcggtgaggattgcgccatcgccacgaggcacgatcagagagacgactttatcgccttcgcctaaacgaataccacgaacaccggtggtgttgcagcccatcgcacggacagaagactctttaaagcgcaccactttaccttcagcggagaacagcattacttcgtcttcgccgctggtcaggtcaacgccgatcagctcatcgccttcaaccagtttgatcgccactttaccggcggtacgcagacggttgaactcggtgaggacggttttcttcacagtaccgttagcggtcgccatgaagactttcacgccttcttcaaactcggtcaccggcaggatcgcggtgatacgttcgtcctgttccagcggcagcaggttgacgatcggacgaccgcgcgcgccacgagtggcttccggcaactggtagaccttcatcgaatagacgcggccacggctggagaagcacagaatatggtcgtgagtgttcgccaccagcagtcggtcgataaagtcttcttctttaatacgtgcggcagatttacctttcccgccacgacgctgcgcttcgtattcagaaagcggctgatacttcacgtaaccctggtgagaaagcgtgaccaccacatcttcctgggtgatcagatcttccaggttgatgtcggcgctgttagcggtgatttcggtacgacgtttgtcaccgaactgttcacgaaccaactccagctcttcacggatcacttccatcagacgatcggcgctaccaagaatacgcaacagttccgcaatctgatccagcagctctttgtattcgtcgagcagtttttcgtgctcaaggccggtcagtttctgcagacgcagatccagaatcgcctgagcttgctgttcggtcaggtagtacagaccatcacgcacgccgaactctggctccagccattccggacgcgcagcatcgtcgcccgcacgttccagcatcgcagcaacgttgcccagctgccacggatttgcaaccagcgcggttttcgcttctgcaggcgtcggcgcatgacggatcagttcgatgatcgggtcgatgttcgccagcgccacggctaatgcttcaaggatatgagcacgatcgcgagctttacgcagttcgaaaatagtacgacgggtcactacttcacggcggtgacgaacaaacgccgcgatgatgtctttcaggttcatgatcttcggctgaccatggtgcaatgccaccatgttgataccgaaagaaacctgcaactgggtctgggagtagaggttgttgagcacaacttcaccgaccgcatcgcgtttcacttcaatcacgatgcgcataccgtctttgtcagactcgtcacgcagcgcgctgatgccttccacgcgtttttcttttaccagttccgcaatcttctcgatcaggcgcgctttgttcacctgataaggaatttcgtggacgataatggtttcacgtccggttttggcgtcaacttctacttcggcacgggcgcggatatataccttgccgcgaccggtacggtaagcttcttcaataccgcgacgaccgttaatgattgccgccgtcgggaagtctggccccgggatgtgttccatcagcccttcaatgctgatgtcttcatcatcgatatacgccagacaaccgttgatgacttccgtcaggttgtgcggcgggatgttggttgccatacctacggcgataccggaagaaccgttcaccagcaggttaggaattttggttggcatgacgtccggaattttttccgtaccgtcatagttatcaacgaaatcgaccgtctctttttcgagatcggccatcagttcatgggcaattttcgccagacggatttccgtataacgcattgccgccgcagagtcgccgtcgatggaaccgaagttaccctgaccgtctaccagcatgtaacgcagcgagaatggctgcgccatacggacgatcgtgtcataaaccgccgagtcaccatggggatggtatttaccgattacgtcaccaacgacacgggcagattttttataggctttgttccagtcattgcctagtacgttcatggcgtaaagtacgcgacggtgtaccggcttcaggccatctcggacatctggcagcgcacggccaacaatgaccgacatcgcataatccagataggagctcttcagctcttcctcaatgttgaccggtgtaatttctctcgcaaggtcgctcatctaaccgctatccctctactgtatcccggattcaaaggtcgcaaattataacacagccgcgcagtttgaggtaaacctatacgctttattcacatccaatgcctgatatactcgtttgtcttgccaattacggagtagaagtgccaatgaatgccgaaaaatcgccggtaaaccacaacgtagaccacgaagagatcgctaaatttgaagccgtcgcctcccactggtgggatcttgaaggtgagttcaaaccgctgcaccgcattaacccgctgcgtctgggctatattgccgagcgtgctggcggtttatttggcaaaaaggtgctcgatgtcggttgtggcggcggcattctggccgagagtatggcgcgggagggcgcgacggtgaccggtctggatatgggctttgagccattgcaggtggcaaaactgcacgcactggaaagcggcattcaggtggattacgtgcaggaaaccgtggaagagcacgcggcaaaacatgccggacagtatgacgtggtgacctgtatggagatgctggagcacgtccccgatcctcagtcagtggtcagagcctgtgcgcaactggtgaaaccgggcggcgatgtctttttctcgacgcttaaccgcaacggcaagtcatggctgatggcggtggttggtgcggaatatattttgcgcatggtgcctaaaggtacacatgatgtgaagaagtttattaaaccggcagaattgctgggctgggtggttcagaccagtcttaaagaacggcatatgaccgggctgcattacaaccctatcactaacacctttaagctcggccccggcgtggatgtgaactatatgctgcatacgcagaataagtgaggttgttgtttggattcatccggcaaccgcgccaagcctgatgcgacgcttgccgcgtcttatcaggcctacaaatgctccccgtaggccagataaggcgtttacgccgcatccggcaacagtgccggtcagacagcgattaccatttcactgtcatcgacaaaaaccctgccgtctgggcaaaatcatcactccctttctgccacgccacgctgccgcgcagcgaaactcgctgactgatattgcccgttattcccacttttatttcaccccgttgcttcgccgcatcgtcactgatagtgctgccatcttcttcaatttccgtcgcatggggatcgtgataataattcagatctaacgttggcgtgacactaacagcagtacgccattcgctgtgtaaacccagccgcgtctgaatatcatcaccctgcgattgtgacacgcgcgcatggttagcggcggtaaaatcatcctgctgcacgccctgataaatcacctgcgcctgcggttcaatcaccacaccacgccccggtaaccattgatacccggcttccagcgaggcgataatccccgacgagtggtaatgatccacgccatcgtcttgttcggaaacatcattgttaaaccacgcatattgcagccagctatccaaccaggccccctgcttctgattaccgtgctgataccagcttgaggtcagcccaacggcataaccgtggttctggttatcggcgcgagttccggtcatattcgagcggctgtcgccctggttatcgctgtagccaccaacaatcccaagcatccactcgccatcatcaccccagtgcccgctaaacaggttgccgctaagctgcaccgtagaagtgtcttcatgctgagccaactgccctaccgccgtgtaatgataacgcccgccgataacgcgtaaattcagcgtctgaccatcgccaccagcgtgatcgcgtcgctccatcacaaatgcctgatttgccgcccgcaggttattaaaatatccaccaactttggcattcaacaccggctggtaggcaggtgtaggttccgggtcgggggttgggtcgggatccggcgtgggatcaggatctggagtcgggtccggatcaggcggcggcgtcggattgacttcttgtgatcgcagataccagtcgttgttatcttccaccagcgtgtagtcatacgcccccatattgacgtagccgcttcctgtcagactgaactgcgcattgttttgaaactgcgcgggatcagctgcgaaatcaactactttaatacctgtagatgtcggctcaccaatacccgtaatggggttaattaccacggccgtgttgccagcagtattaccgttcaataccagttggtcacttgctgagtcatcgccgtttaattcgctatcgagcagtagcgtaccgccgccggtataatcaccatttaccgtcagcgtgtcgccagcgacgccattttgcaggctaatcgcaccggacgtattggtcagattgccattaaccgtcacgtcggaaagataagtcaggctgtcagtttcaaggttggtattaagctcacctgccagcgtcacgccatcggtggcattcaccagcgtaccgtcgccgctaaacagcgaggcatccagcgcctggttcgtatcctgctgcgtcaatcgcaacacagtaccatcggttatgtcgatatcgccgccagaggtggcatcgattgaacgaatatcctgattttgcccggtttcaaaaacaccgtcttcccccacccacagtgaagaaacataaggaataatattctccgcttcaccttttagcgttccgtcctccacacgtaccgcagacgtcgcagtgccgctggcagtcaactccagcgtaccgccgccacttttagtcaacgtgcttacgctatccagttgttgcccggtactatccgccatcaacccgccccattgcgtatctacgccatcctcaacgtgtatttcgccatcagcgcgcatttcaatattcctgccctgacctgttgtagccgagcgagtgtcaacatcagtcgtcacatccatttcactgtgttgttggggatctgtgaagatcactgaacggttgtaacttgtgtcccccaattgcgaattatcgctgacttcaagcgtaccggaggcgatttgcgtattaccgagataaccgttgttattcgccagcgttacgcgctgatcccccgcattaatgacgacataaacgccattctggctggcatcgctgccgccaatatgtaaatcatcgccactgctgatatcaacgacatcattactgccaatcactgtccccccgctgccgctgatttgcagaccgtcattgtatgagctatcgccatcccaggtggtgaaatcagagagatccaatactccgccatttagcacgatcgattgcggatcgctctgcattgcccgtaaatcggcctgattccccgccagcgacaatacggcgttatcttccaccacaatatcgccggttaatgccatcgactgcgcccctgtcaggagatagctgccatcttgcgctaccgtcaactgtccttcaccctgaatcgagccggaaaaaccgccctggtttactgtaacattgccgcctgcgtcgatattcaaaatgccattagcaaaaccggttaatgagtgcacaaacgtttgttgtgtattgccaacattcagttctgcctgatactcagaatgaacagtgctgccgaccatcaaaccaaagcaatcctgcggatcgctctgacagtgcgtgtcgccgacattcattaactcatcgctgcgccccaacgtcacctcgccattctggatactcatctcgccggtaaacgcattattgtcggcattgaggactaactctcccgctccctctttcacgatgactcccgttccggcaagagaatcaatcgcgccatcgttgctggtattgcctattaccagcgttttatcggcggcaatgttaaattcagccacactatgaccgatatacataaagccccccgccgctgccgtcgccgaatggtcatatcccgaggcgctgttattttcatcaatcatcacaccattgttttggtcataattatcatcaacagaaatatcaataagatacggggatgtggtgctgctggtataaattgcgccgccataaccttctgcatagttattggtaaaggaggtattattaattatcgtttttcctgaaagatgtgtgttatccgtactattatccgtaacatcaatggcgccgccatccccatcactataacttgttgatgtatatgcctggttattattaaaagcatcatcacttaaatagacgtcattattgatggtataaattgcaccgcctttgccgtcattagcgatgttattgtgaaatacggcgttagtgacacgtaaatcggcggcaccggtatcattggtaccggcagaatagattgccccgccatagcctcctgcaacattactgtcgaaaataacattcgcaagatttatcgttgagttttctttagcaaagatagccccaccattattatattcgccactaaccgagttatcagcaaacagggtcatccctgtttcattttgtggtgatatcgtaaattcagcactgtgctgcaaaaatactgcgccaccgctggcattattggccatacccgaaaaaatcaaccattgcccatccgcgatgctccagtcctgcatattgcctgaaaggctttgcctgctggcctgacagttcgctttgatatcatatccctggcatgaatcaatgaccgctgcggcaccgttagcagagaaaagagatgcaatcattgacgggagtaaagataaatactccttgcgtagagagataatccgcatattcatctaaccatcattttctataagatggcgtatttaatcgcattatgcgatatagggtatttttcttttgtaaattctgcccctgatgtaataactattttgttattatctgataattaatttagatgcatcacaattcaaattaataactttaaggtaaatcggttatatttaaactgaattaaagcaataaataatattcttataataaatacaaaagtaacaaattggcttagtatttaacaataaccgaatataaaacaaccatttccgactcaacaatcgcttacactcgcttatatattgaccacaactgatacatcagattatgtgacgacttgtgcctagatcaattttggcaatcattagcaacaagattaataaaccatctatatcaatttacctatcctattttaccgttcaagaattcaccgaacggttatttttaacaaatttttctcttcccattgactttcccggacaccttgtctgacctaaggtgcgcggaagccactttttccttcctgagttatccacaaagttatgcacttgcaagagggccagtttcacactatcttgcagtgaatcccaaacataccccctatatatagtgttcttagcagcttccctcactacaggtagtctgcatgaagctattgaaaaacaggtacgacatacatgaatcagaatctgctggtgacaaagcgcgacggtagcacagagcgcatcaatctcgacaaaatccatcgcgttctggattgggcggcagaaggactgcataacgtttcgatttcccaggtcgagctgcgctcccacattcagttttatgacggtatcaagacctctgacatccacgaaaccattatcaaggctgccgcagacctgatctcccgtgatgcgccggattatcagtatctcgccgcacgtctggcgatcttccacctgcgtaaaaaagcctacggtcagtttgagccgcctgcgctgtacgaccatgtggtgaaaatggtcgagatgggcaaatacgataatcatctgctggaagactacacggaagaagagttcaagcagatggacacgtttatcgatcacgaccgtgatatgaccttctcttatgctgccgttaagcagctggaaggcaaatatctggtacagaaccgcgtgaccggcgaaatctacgaaagcgcccagttcctttatattctggttgccgcgtgcctgttctcgaactacccgcgtgaaacgcgcctgcaatacgtgaagcgtttttacgacgcggtttccacatttaaaatttcgctgccgacgccaatcatgtccggcgtgcgtaccccgactcgtcagttcagctcctgcgtgctgattgagtgcggcgacagcctggattccatcaacgccacctccagcgcgattgttaaatacgtttcccagcgtgccgggatcggcattaacgccgggcgtattcgtgcgctgggtagcccgattcgcggtggcgaagcgttccataccggttgtattccgttctacaaacatttccagacagcggtgaaatcctgctctcagggcggtgtgcgcggcggtgcggcaacgctgttctacccgatgtggcatctggaagtggaaagcctgctggtgttgaaaaacaaccgtggtgtggaaggcaaccgcgtgcgtcatatggactacggggttcaaatcaacaaactgatgtatacccgtctgctgaaaggtgaagatatcactctgttcagcccgtccgacgtaccggggctgtatgacgcgttcttcgccgatcaggaagagtttgaacgcctgtataccaaatatgagaaagacgacagcatccgcaagcaacgtgtgaaagccgttgagctgttctcgctgatgatgcaggaacgtgcgtctaccggtcgtatctatattcagaacgttgaccactgcaatacccatagcccgtttgatccggccatcgcgccagtgcgccagtctaacctgtgcctggaaatcgccctgccgaccaaaccgctgaacgacgtcaacgacgagaacggtgaaatcgcgctgtgtacgctgtctgctttcaacctgggcgcaattaacagcctggatgaactggaagagctggcaattctggcagtacgcgcactcgacgcgctgctggattatcaggattacccgatcccggccgccaaacgtggagcgatgggtcgtcgtacgctgggtattggtgtgatcaacttcgcttactacctggcgaagcacggtaaacgctactccgacggcagcgccaacaacctgacgcataaaaccttcgaagccattcagtattacctgctgaaagcgtctaatgagctggcgaaagagcaaggcgcgtgcccgtggtttaacgaaaccacttacgcgaaagggatcctgccgatcgatacctataagaaagatctggatgccatcgctaatgagccgctgcattacgactgggaagcactgcgtgagtcaatcaaaacgcacggcctgcgtaactccacgctttctgccctgatgccgtccgagacttcttcgcagatctctaacgccactaacggtattgaaccgccgcgcggttacgtcagcatcaaagcgtcgaaagacggtattctgcgccaggtggtgccggactacgagcatctgcacgacgcctatgagctgctgtgggaaatgccgggtaacgatggctacctgcaactggtgggtatcatgcagaaatttatcgatcagtcgatctctgctaacaccaactacgatccgtcacgtttcccgtcaggaaaagtgccgatgcagcagttgctgaaagacctgctcactgcctacaaattcggggtcaaaacgctgtattatcagaacacccgtgacggcgcagaagacgcgcaggacgatctggtgccgtcaatccaggacgatggctgcgaaagcggcgcatgtaagatctgatattgtgatgccggatgcggcgtgagcgccctacccggcctacgggtccaatttgtaggccggataagcgaagcgcatccggcactggatgcccagatgcggcatgaacgccctacccagcctacgatgcggtttgtaggccggataagcgaagcgcatccggcataaaactcctaacaggacacattcatggcatataccaccttttcacagacgaaaaatgatcagctcaaagaaccaatgttctttggtcagccggtcaacgtggctcgctacgatcagcaaaaatatgacatcttcgaaaagctgatcgaaaagcagctctctttcttctggcgtccggaagaagttgacgtctcccgcgaccgtatcgattaccaggcactgcctgaacacgaaaaacacatctttatcagcaacctgaaatatcagacgctgctggattccattcagggtcgcagtccgaacgtggcactgctgccgctgatctcgatcccggaactggaaacctgggtagaaacctgggcgttctcagaaacgattcattcccgctcctatacccatatcatccgtaatatcgttaacgatccgtcagttgtctttgacgatatcgtcaccaacgagcagatccagaaacgtgcggaagggatctccagctattacgatgaactgatcgaaatgaccagctactggcatctgctgggcgaaggcacccacaccgttaacggtaaaaccgtaaccgttagcctgcgcgagctgaagaaaaaactgtatctctgcctgatgagcgttaacgcgctggaagcgatccgtttctacgtcagctttgcctgctctttcgcattcgctgaacgtgagctgatggaaggtaacgccaaaattattcgcctgattgcccgcgacgaagccctgcacctgaccggcacccagcatatgctgaatctgctgcgcagcggcgcggatgatccggagatggcggaaattgccgaagaatgtaagcaggagtgctatgacctgtttgtccaggcggcacagcaagagaaagactgggcggattatctgttccgtgatggttcgatgattggtctgaataaagacatcctctgccagtacgttgaatacatcaccaatatccgtatgcaggcagtcggtttggatctgccgttccagacgcgctccaacccgatcccgtggatcaacacctggctggtgtctgataacgtgcaggttgctccgcaggaagtggaagtcagttcttatctggtcgggcagattgacgcggaagtggacaccgacgatttgagtaacttccagctctgatggcccgcgttaccctgcgcattactggcacacaactgctgtgccaggatgaacacccttcccttctggcggcgctggaatcccacaatgtggcggttgagtaccagtgccgcgaaggttactgcggctcctgtcgcacccgactggtcgcaggccaggtggactggattgccgaaccgttagcttttattcagccgggggaaattttgccctgttgttgccgggcaaaaggcgatattgaaatcgagatgtgaattggttttaacgccagatacgacgcttatacgtcttatctggcctacaacgattacatagcgtagtaatatgctttcacctgctcccagtccgctttggggatcggctccagatatttttccagctggcggaagtcatgattaatcgctttatcacgacgcaagcggcgacgacttttctccaggtcaagaaatccagcttctgccttaccttctgttttcacatagatatggcgaacataacaacagccatgctgacgattaacgctatgcattttcttaaacgccagcgccactgctttcaacatggcttgccgtacttcgtcagaataaggcgatactgcatgccgggcataccagtcagcaatgctgatgaaccccgccatatcttcagtcaccagcaacgcgcgccattcaccctcaactttcaccgcttcaccaaaaacgatcttcggcacgatgacaccggcccgttccagttctttaattaccgcaacctcacggacaatcgttggtcggccgaacgggtaacgtacagaatgaaacagatgatgcgtcatgcgctttacatacagctttttgccgttgcgctcgacgcattgcaccccgctcataccattacggcgatagttaggctcttcaacccagtcgccctctgttgcccaccagtgattaaattcgtcgtgctttgctgaaactgccataccctatcgcctgtcgttttttattaacgacaatgactatagatgtttagctgaggaaaatcttaataatacgtgttgtattgacgagtatcttatgccgggaacaagtcatctcgctcaaaataattgcaattaaggataacccacagactttaatgaagagtggtatcggatagcacataagtgccatccggtagttaatttactctttattaaggaattttactgccttatcagggaaatcagtaaatagcccgtttacacccgctttgttatacagagcatcatataactgattcacatcagtagtgtattcaggcagtttatctgaccgcacggtataaggatgcactaccagtttattctgctgagcatcttgcaccatgccagtgagtttgatattacccggctgcgatgtctcctcaatcaacatatggtaatccggaccaataccatcagcatattccgccacctgtttcatagcccccggcttaaacatccagtcgtaattgtaattaacccagcttccgtccggctgtttctgctgcgtttcattccagtcggtataggcaatcagctgtaccagattgagatccatacccattttgggttccagcacattcttaatacgcttcagctcatcagcatcaaaacattgcaaataaactttgtcgtccttaccggtgtaaccatatttcttcagcacttccagcgtttttgccgcaatatccttcccttcctgatgatggaaccacggcgctttaatttctggatagataccgatatttttcccggtagagtggtttaacccctgaacaaattcaatctcttcttcaaaggtgtgcacccggaagtcagatttacccattgggaaacgccccggataagtctgcacttttttaccgttttcaatatcgaaaccttcggtaaatttcagcgacttaatttcatccagcgtgaaatctatcgcgtagtaacgaccgtctttgcgcgctcgatccgggaaacgatcggcaacatcagtaacacgatcgagataatggtcatgcagaacaaccagatggtcgtctttggtcatcaccaaatcctgttccagataatccgctccctgcgcatacgccatcgcttttgctggcagcgtatgctccggcaaatatccactggcaccgcgatgggcgatgactattttttcgttgctgtccgccgccattgcactgcttcccatgactatagtgctcatcatgatcgccatgctaaggtttttcagcgtcaatttcatgccattagcctccgttgcgtttttgcagtaattgttcatggcgacgtttttcgccaatcatcacaacaatcaacaagataaccgccagaatgctgccgccaatcattaccataaagccgccatcccagccgaagaagtccacggtgtagccaacaatcgcgctcgccgccaccgaaccgccgaggtaaccaaacagcccggtaaaacccgctgccgtacctgccgcttttttcggtgccagttccagcgcatgtagaccgatcagcatcacagggccatagatcaggaagccgataacaatcatacaaatcatatcgacggttgggttacctgccgggttcatccagtaaacgatagtcgcgatggtcaccagtgtcataaagaagacgccggttgccccacggttaccacgaaagactttatccgacatccagccgcacagcagggtgcccggaatacctgcatattcataaaggaagtaggcccaggaggatttatccagcgcgaaatgcttaacctctttcagataagtcggtgaccagtcgaggatgccgtaacgcagcagataaacgaacacgttggcaatggcgatgtaccacagcagtttgttcggcagcacgtactgcatgaagatctgcttcgcggtcagctcctgttccgctttttcgttatagtcgtccggataatcatttttgtactcttcgatcggcggcaggccacaggattgcggggtatcgcgcatcatcgcaaaggcgaacagtgccaccagaatggcgcagaaagcgggcatatagagcgccgcgtgccagtcattgaaccaggccatccccagcaggaacagcagcggcggaataccaccaccgacgttgtgcgcacagttccacactgacacaatgccgccacgttctttctgcgaccaccagtgcaccatagtacgaccacacggcggccaccccatcccctggaaccaaccgcagaggaacaacagtacaaacatcaccgcaatgctcgacgtcgcccatggcacaaagcccataaacaacatcactgccgccgccagaatcaaacctgcgggcaggaaaacgcgcggattcgagcgatccgataccgaacccatgatgaatttcgaaaatccataagcaatcgagatccccgaaagggcaaaacctaaatcaccgcgtgagaatccctgctcaaccagataaggcatagcgagcgcaaagttcttacgaaccaaatagtaagcagcatagccaaagaatatccccaggaaaatttgccagcgcaatcgacgataagtcggatcgatctccgcggcaggtaagcgcgctttgtgtggcgctggtttaaaaatactcaacattgatagcctccgtggcccgtggtcttatttatgattaacagcctgattccgtgggagaacctgccgtttcttgagttgccgcgatgttaagaaaacattcataaattaaatgtgaattaccgcacacattattaaatacgatggttgaaatgttcagaatgacgcatgaaatcacgtttcactttcgaattatgagcgaatatgcgcgaaatcaaacaattcatgtttttactatggctaaatggtaaaaaacgaacttcagagggataacaatgaaaactcgcgactcgcaatcaagtgacgtgattatcattggcggtggcgcaacgggagccgggattgcccgcgactgtgccctgcgcgggctgcgcgtgattttggttgagcgccacgacatcgcaaccggtgccaccgggcgtaaccacggcctgctgcacagcggtgcgcgctatgcggtaaccgatgcggaatcggcccgcgaatgtattagtgaaaaccagatcctgaaacgcattgcacgtcactgcgtagaaccaaccaacggcctgtttatcaccctgccggaagatgacctctccttccaggccacttttatccgcgcctgcgaagaagcagggatcaacgcagaagccattgagccgcagcaagcgcgcattatcgaacctgccgttaacccggcactgattggcgcggtgaaagttccggatggcaccgttgatccatttcgtctgacagcagcaaacatgctggatgccaaagaacacggtgccgttatccttaccgctcatgaagtcacggggctgattcgtgaaggcgcgacggtgtgcggtgttcgtgtacgtaaccatctcaccggcgaaattcaggcacttcatgcgcctgtcgtagttaatgccgccgggatctgggggcaacacattgccgaatatgccgatctgcgcattcgcatgttcccggcgaaaggatcgctgctgatcatggatcaccgcattaatcagcatgtgatcaaccgctgccgcaaaccttccgacgccgatattctggtgcctggcgataccatttcgctgattggcaccacctctttacgtattgattacaacgagattgacgataatcgagtgacggcagaagaagttgatattctgctgcgtgaaggggaaaaactggcccccgtgatggcgaaaacgcgcattttgcgggcctactctggcgtacgcccgctggttgccagcgatgacgatccgagcgggcgtaacgtcagccgtggcatcgtgctgctcgaccatgctgaacgcgatggtctggacgggtttatcaccatcaccggtggcaaactgatgacctatcggctgatggcggaatgggctaccgacgccgtatgccgcaaactgggcaacacgcgcccctgtacgaccgccgatctggcacttcctggttcacaggaacccgctgaagctaccttgcgtaaagtcatctccctgcctgccccgctgcgcggttctgcggtttatcgtcatggcgatcgcacgcctgcctggctgagcgaaggccgtctgcaccgtagcctggtatgtgagtgcgaagcggtaactgcgggtgaagtgcagtacgcggtagaaaatttaaacgttaatagcctgctggatttacgccgtcgtacccgtgtggggatgggcacctgccagggcgaactctgcgcctgccgcgctgccggactgctgcaacgttttaacgtcacgacgtccgcgcaatctatcgagcaactttccaccttcctaaacgaacgctggaaaggcgtgcaacccatcgcctggggagatgcactgcgcgaaagcgaatttacccgctgggtttatcagggattgtgtggtctggagaaggagcagaaagatgcgctttgatactgtcattatgggcggcggcctcgccggattactctgtggcctgcaactgcaaaaacacggcctgcgctgtgccattgtcactcgtggtcaaagcgcgctgcatttctcatctggatcgctggatttgctgagccatctgccggatggtcaaccggtgacagacattcacagtggactggaatctttgcgtcagcaggcacctgcccatccttacactcttctcgggccacaacgcgtgctcgatctcgcttgccaggcgcaggcattaatcgctgaaagcggtgcgcaattgcagggcagcgtagagctggctcaccagcggattacaccgcttggcactctgcgctcaacctggctaagttcgccagaagtccctgtctggccgctgcccgcgaagaaaatatgcgtggtgggaattagcggcctgatggattttcaggcgcatcttgcggcggcttcgttgcgcgaactcgaccttgccgttgaaaccgcagaaatagaactgccggaactggatgtcctgcgcaataacgccaccgagtttcgcgcggtgaatatcgcccgtttccttgataacgaagaaaactggccgctgataattgatgcgctaatccctgtcgccaatacctgtgaaatgatcctgatgcccgcctgtttcggcctggccgatgacaaactgtggcgttggctgaatgaaaaactaccttgttcactgatgcttctgccaacactaccaccttcagtgctggggatacgtctgcaaaaccagttgcagcgtcagtttgtgcgtcagggcggtgtgtggatgccgggcgatgaagtgaaaaaagtgacctgtaaaaatggcgtggtgaatgaaatctggacgcgcaatcacgccgatatcccgctgcgcccacgatttgtggtgcttgcgagcggcagtttctttagcggcggactggtggcagaacgtgacggcattcgcgagccgattctcggccttgatgtgctacaaaccgctacgcggggtgaatggtataagggcgatttttttgcgccgcagccgtggcagcagttcggtgtaaccactgatgaggcgctacgcccgtcgcaggcggggcaaaccattgagaacctgtttgccatcggttcggtgctgggcggatttgatcccatcgcccagggatgcggcggcggtgtttgtgccgtcagtgctttacatgtcgctcaacagattgcccaacgcgcaggaggccaacaatgaatgacaccagcttcgaaaactgcattaagtgcaccgtctgcaccaccgcctgcccggtgagccgggtgaatccgggttatccggggccaaaacaagccgggccggatggcgagcgtctgcgtttaaaagatggtgcactgtatgacgaggcgctgaaatattgcatcaactgcaaacgttgtgaagtcgcctgcccgtccgatgtgaagattggcgatattatccagcgcgcgcgggcgaaatatgacaccacacgcccgtcgctgcgtaattttgtgttgagtcataccgacctgatgggtagcgtttccacgccgttcgcccccatcgtcaacactgctacctcgctgaaaccggtgcggcagttgcttgatgcggcgttaaaaatcgaccaccgtcgcacgctaccgaaatactccttcggtacgttccgtcgctggtatcgcagtgtggcggctcagcaagcgcagtataaagaccaggtcgctttctttcacggctgcttcgttaactacaaccatccgcagctaggcaaagatttaattaaagtgctcaacgcgatgggtaccggtgtacaactgctcagcaaagaaaaatgctgcggcgtaccgctgatcgccaacggttttaccgataaagcacgcaaacaggcaattacgaatgtagagtcgatccgcgaagctgtgggagtaaaaggcattccggtgattgccacctcctcaacgtgtacatttgccctgcgcgacgaatacccggaagtgctgaatgtcgacaacaaaggcttgcgcgatcatatcgaactggcgacccgctggctgtggcgcaagctggacgaaggcaaaacgttaccgctgaaaccgctgccgctgaaagtggtttatcacactccgtgccatatggaaaaaatgggctggacgctctacaccctggagctgttgcgtaaaatcccggggcttgagttaacggtgctggattcccagtgctgcggtattgcgggaacttacggtttcaaaaaagagaactaccccacttcacaagccatcggcgcaccactgttccgccagatagaagagagcggcgcagatctggtggtcaccgactgcgaaacctgcaaatggcagattgagatgtccacaagtcttcgctgcgaacatccgattacgctgctggcacaggcgctggcttaaactcctttctgatgcccggtaagcatgttgttaccgggcatttttgcgtacacgattccgtgcccaatgtatgcgttgcaacgcagtgaaaattcctctgaaaacgtctcgcaaaggctgaaactggcagatgtcaaaggcctgggataaccgtaatgtcgcgtcatcataaatatcaggtgacggacaaccatgaccgaatcaacaacctcctccccgcatgatgcggtgtttaaaacctttatgttcacacccgaaaccgcacgggattttctggaaatacatctaccagagccgctgcgcaagctttgcaacctgcaaaccttacgcctggaacccaccagttttattgaaaaaagtttacgcgcttactactcggatgttttgtggtccgtggaaaccagcgagggtgacggctatatctactgcgtgattgaacatcaaagctctgcagaaaagaatatggcttttcggctaatgcgctatgccactgccgccatgcagcgtcacctggataaaggctatgacagagttccgctggtggtgccattgctgttttatcatggcgaagcctcgccctacccgtactcactcaactggctggatgagtttgacgatccgcaacttgcccggcagttgtacaccgaagcttttccgttggtggatatcaccatcgtacctgacgatgagatcatgcaacatcggcgtatagctctgctggaactgattcaaaagcatattcgcgaccgcgatttaatcggtatggtcgacaggatcaccacgcttttggttagaggcttcactaatgacagtcagctacaaacactgtttaattatctgctgcaatgcggcgatacctcccgtttcacccgctttattcaggagattgccgaacgttcaccactacaaaaggagagattaatgactattgctgaacggctacggcaggaaggacatcaaattggctggcaggaaggtaaattagaaggtttgcaggaaggcatgcatgaacaagccattaaaattgctttgcgcatgctggagcagggcattgatcgtgaccaggtgctcgcggccactcagctaagcgaagccgatctggcagcgaataaccactaattaacacaggcccacagccgatccccatgggcctttgatatcaataactaccttttacgcgtggcccatttttgcctgatttaaacatcgccagtcgttgatccagggcatcgctgtagagcatcgtgtcaacgccaacagcgacaaagttcgctccccacgccaggcattgctgcgccatatcaggagccacagccagaaaaccagccgctttacccgcagcacggatccgccgaatgctggtttcaataattcgctgcacttccgggtgcccggcgttatccgggtagcccaacgacgcagaaagatccgcaggtccaataaacacgccatcaatcccttcaacatcgaggatttcgtccaggttatccagtgccgttttactttccacctgcaccaacagacaaagcgaatcgttgacttgcgccatgtaattctcaatgcgtccccagcgtgcagcccgtgccacactggccccaacaccacgctcaccgtagggaggatagcgcgtggcagacaccacctgacgtgcctgatcggcagtatcgaccatcgggatcagtagagtttgcgcgccaatatccaggacttgtttaatcagcggcttactgccttccaccggacggatcacggggtggctggcatagggcgctaccgcctgtagctggtgataaagatcctgaatggtgtttggcgcatgctccccgtcaatcagcaaccagtcataaccggaagtggcggcaatttctgccatataggcagtcgttgagcttaaccacagaccaatttgcacttcgcccttgcgtaaacgttctttaaagggattggttaataatgcgttcatcgtgttccttaaactatttaatgatgtgccacgtcggtctgcgcaacagtgcgatttacacgcagagtgaaaataatcagcgaaccgatgaccgccaccgctgccagcgtcagtaatcccgccgcatcgctggaaaataacgtttctgctttcacgcgcaggatcggggcaataaacccgcccactgcaccaaacaggtttataaaaccaatccccgcagccagcgccgtaccggaaagaagctgtgtcggcatcgtccagaacaccggttgcacggcaataaacccgatggctgcaacacacagtgctacgatcgccagtactggagaaagcagcccggacagaccaataccaatgcccgccgccagtaatgtcagcgctgcgacattacgccgttcgccggttttatcggagtagcgcggaataagccaggtcccaaacaaggccgcaacccacggaatggcggtgaccaccgacgccgtaaagcccacttttgtccccagcaatgcagcaacctgggtcggcaggaagaaaattaatccgtaaaccgccacctgaatggtcaggtagataatcgccagttgccagactcgcccattacgcaacgcatcgctcagtcgcgaagtcactttctgttgttcttcacttgccagttgattgataagtaacgttttttcttgtttactcagaaaacgtgcctgctccggtgtgtcatcaagccaaaagaatgtgaataccccagcgccgactgccagcaatccttcaatcacaaacatccagaaccagccgggatgccccataaatccatgcatctccagcagcgcgccggaaagcggtgatcccagtgttaacgccagcggtgcgcccatatagaacagccccataatgctggcgcgattacgctgcggaaaccattgcgaagtgagataaatcataccagggaaaaaaccggcctccgcagcaccaagcagagtgcgaacgatcagaaatttcgcttcagtatcggcccatgccatggcagccgaaagaaatccccacagcagtgttgtcgtaccaatccaggttctggcccccagtttgcgcatcaaaagattcgccggaacccccagaaacgcgtataccacaaagaaaatgcctgctcccagcgcataagcttcattactcagcccggtatcaatctggtaggtctgtttggcaaaaccaatattcgaacggtcgagaaacgccagcacatacagcgccaacataaacggaattaaacgcgcgcggtttttcttcaccacggcgtcaagcaaagcggtgctcataaaaagctccttagaatatgtgggcgttaccgttgtcacagcaacgcccggagtgattagtggctgtaggggcgtttcaaattgcagtcacgattgagttcgacgccgaaaccgggtttatcaagcactgatttatgaatacgaccattcaccggtactggctcattaagcagaatcggatcaaattgcggacgcatcgttgaacaatccgggctggtcatcaggaattcgctgaatggcgtattggtgaaggtgatcaccgcatggtgggagtaaacagacgaaccgtgtggcaccaccagttgcccccttgatttggcgattgcggcaatttccaccagcgtggttaagccaccgcaccagccaacatccggctgcataatgtcgataccggtttctgaaagcgtacggaaagattgcagtgtgccgtggtgctcaccgctggtgaccatcatccccgctggtgcgttgtgtttcagttcgcgataaccttcatactgctgtggcggcaggcactcttcgatccatttcaggttatagggcgcgcaagcgtgggccagtttgatggcatagttcacgtcctgactcatccagcagtcgagcattaaccagaaatcctcaccgcatttttcacgcatatccgcgaccatagcggcatctttgcggatccccgcatcaccatcatgtggcccccagtgcgtcggcattttgccaccgataaagcccatctcttttgccagatccggacgcgcacctgtggcgtagaactgaatttcatcacgaactgcaccacctaaaagtttataaaccggaagcccgaccactttgccgaacagatcccacagagccagatcgacacaggaaatcgtattcatcaccaggccaccagagccggagtaatacagggtggcattgagcatttgatcgtggatcagtttgatatcactgacgcatttaccctcaatgaaacggttaagatgtttttcgacaataaaacagcccatttcaccggctgtcgaaacagcgaatccggtctggccgttttctgcttcaacttcaacaatcaacgtgccaagaacgttaatgccaaatgactggcgtgactgctcgtaatcgcggtatttactcatcggggtggcaatatgatcatcaatccagtgattcgccccctggtcgtgataatcaccgccgccagcgcctttttctgctgtcgcaccgccagtaaaccaggcgcgaacctgtttgatttttggtagggtcatgatgttctccattgttatgaggcctgtaagtcaaagggacttttccatcccaacaaacgtgaaatatccctggcgcaggcaatagccttgcccgccagataatcacggtattcttcattgatttgtaagcgggtaccgaccaccgaaatcgcagcggtaagctcgttattggcgttaaacaccggcgcagcgacacaacggacatcggcataatcttcgccgttgtcatagctccagccctgacggcgaatacgcgccagttcctcgtagagccgttgtggatgggtaatggtggtgggtgtcatctgctcccagaccagctcttcgataatacttttctgtacagcttcaggttgccaggcaagcaggcatttacctattccggagcgataaagcgaaaggctttttccttcatgggaacgcacgctgatagtggctgatgactccactttcaaaatgtaataagcgctgccgttatcaataatccccaggtgacataacagcccggtggtatccatcagttgcgtcaaacgcggtcgagccagttcccggagatccatcttgcttaacgcatgaccggaaagctccaccagcctggtccacaaacaaaaattttcctggtgatcaaggctaagaaaacgctgacgcctgagttcattaagcagcaaataggctgtgcttttagggatccccaatgtgtcaatgatcgtcgcagcactacaggggccaatccgggcaatcaaattgagaatatcaatagcccgtgtcagggcgggaactttgcttgattccaacatactggactccagtcttagatactggaatcagtctcgttgctcagggggagtaaaattgtgaagcgcatcaaatcccgtttctcgtccagcggactggagaaattacgcacaaatttgtgaatcagcgcacggattttttcttattgagtacaacaggttggacaaattttgccggagggggaatgtgccggtgcagtaaaccggcacagagtggcggaatcagacagataaggtcatggactcaacaacctcaatccagccatgctcgctggcgatgtcctggccgtttaaccaacggcgtagcatattaagcgccatcattgcgcagacttcctggcgaatagccagactgtagcgtgtggcactgaaatgtacacgcaaagcgaaagtgccgtctggcgtggctagtgcaaagttgagatgctcatcttccagaccagaaacagccagtgccaacccagcaaaatggttcgcccgccgttctgtaatccagtgcgcagtttgcgccagggtttcctcctgtgaaggaaccacttcacacgccagcaatggagcatctgcgcgagaaagttgcaaagccaataaaccaccggtgaattgctcgctcagcgtcaggctgaactggcggctctgcaattcgcgactgatctgcgcgggcagtccttcggtgccttcgaaaatcacgctctgtccggcaacacgtttaacgtccagccacagtttttccatcgcctgttcctcgcttgccggtccggtgagtttcagttcgataatcggcattgaggagcgatagcccattgttacgcccggcggcagttgtagagtgtccaggctttgtgccagatcgctttccgaacgaccaaaggtagtcaaacgcaggcaaaccggcggctgtggtaaagaaaaacgctcgcgcaggcgcggcaggatttcgtgctcgaccatcaccttaaattctgacggtacgccgggggtaaagaacatcaggcaacgattaagctgtatggcaaaaccacaggcagtgcctaccgggttattgataaattcagcactggcaggcagctccgcttgtttacggttgctcggtgccattactcgtccccgttcatggaaatagcgttccatctctttgagccaggcttcatgcagcaccaggccttcaccttttgctgtcgcagcggcgagtgcgcttaaatcatcactggtcggtcccagcccgccgttaacgatcagcacatcggcgtgctgactacgttcgcgaagaatggtgactaagtcatcaagattatcccccaccgtattgcggcgagataatggcagcccctgatgaaagaaaaaatcggccagccaggcagcgttagtgtcaacgatttgcccgtgtaacacttcatccccggtggataacatttccacttttaacatggttatctcctgcttttgttatcgaatcactataacgcaaagggagacagggcgtagtaagaaactgaatggcgcgacagaacgccgcgccggaaggcgtcagaagctggcatttaccccaacatacggaccatcagcaatggcgttatcacgattgccatttttacctgccaggttcaggtaacggtagccagcctcaatgctgactggacgcataatggtgtaacgcgcgccagcattcgcttcttcataacttttaattccgctggagagcgaatccggagagtagtaatactcaccaaacaagcggaagctgtcaccaatttgccactgcaaaccaccgccaactgccgctgcataaccttcatcaccatcgttcgggttggtgtaaacgccttttccgccaacggtcgccattaatggtccgagaggcagattcaaccccagccccacgcccgcggcatcaccgtcgtcgtcgttatgtgtccagttaccgcttaacgccaggcccgtcgattcagtcccaaaaccgacaccaatattggtgtattctttacccgcctggccgctgatgctcattgcattgaccgatgcagaaaccaacagcattccggccagacctgctagcgcaatttttttcattatcccctttcccacaagcaattaattaaaattcccaaagctgcgggattgtactgcctggcgcagaggattcaatgagcgaaaaaagggatctagtcacttattgtaactaaatacttcttaaataattaaacgccgaaaaaataaacacactttatcgatacacacaaaaataataataaatgtagttatcatcgcaaaagagattactgtcactttcacatatttctgagttaccgtattctcatggtttctttttatttataaggaatacccctgtgcgacaacggactattgtatgccctttgattcaaaatgatggtgcttatttgctgtgtaaaatggccgacgatcgcggcgttttccccggtcaatgggcgctttcgggtggcggcgtggagcctggcgaacgaattgaagaggcactacgccgcgaaattcgcgaagaactgggagaacagctgcttttgacagaaatcacgccgtggaccttcagcgatgatattcgcaccaagacgtatgcagatggtcgcaaggaagagatttatatgatttacctgatttttgactgcgtttctgccaaccgagatgtgaaaataaacgaagagtttcaggactacgcgtgggtaaaacctgaagatctggtgcattatgatttgaatgttgccacccgaaaaacgttacgtttgaaaggtcttctttaacaatgatgacagccatcactggctgtcagattgaaaatttagtggttaacgaattccccatccagataaactttgcctttttccacatgcatgactaaaccatccagataatcaggtttaaatgtcgcatcacgcttatctttagcaatatatgtcaggcaatgattatgggtaaaaataacgatatttttatcaggtgctttgcgttgtaagtctttaattgcactataaatctcattaccgcattgaagaaatcgtttatctaccgtcagctttttacccgccgaaaaccaggtcgccgactgaatagtccggacggtattactggaatagagatcaaaatcagggatatcagcactaaaagcgttgcccagttcacgggcatcctgggtacctttgaccgtaatacctgttttatctgacaagcattgattggttgaacgatcgcaacgttcagcatggcgaaacaaaacgacaaccgggtgctgctgtgccagtctggccagtgttttattgtcgatgcgtggcaaaccattgctactccaggcggcatgagtacccagtccggcaatcgcagcgagcgccagtaaaatgatgaaatatttttttgacttcaacgaagatcggcaaaaagctaacacgtaaactccacctgtagacaagcgcaaccagacaattaccgtgaaattgagcgacttttctggcgataattagcagttggtgtaatattaaaaatcctatgatgccggcaaaatgcctcaaaattttgccaaatgcaaagtctaaataagaaaaaatataaaaatttcaatatttacgtctaatattagtttcttaaggttaagttaatattctatccttaaaattttgctccaaatggcaaaatatgcacaacactctttatagcaaatataagtggacaggtattcaatgacggatggaaaaaaaatgtcaggatttttgcctttttcgcgaccagcaatgggcgtagaggaactcgctgcagttaaagaggttctcgaatccggttggatcacaaccggtccgaagaatcaggcgcttgaacaagctttttgccagttgacgggaaatcagcatgccatcgcggtcagttcagccaccgccggaatgcatatcacgctaatggcgttggaaattggcaagggcgatgaagtgattacgccttccctgacctgggtttcaaccctcaatatgatttccttgctgggtgcaacgccggtaatggtggatgtcgaccgcgatacgctgatggtcacgcctgaagcgatcgaagcagccattacgccacgcactaaagccatcattccggtgcattatgccggtgcgccagcagatattgacgccattcgcgccattggcgaacgttacggcatcgcagttatcgaagatgctgcccatgccgtcggtacgtattacaaagggcgacatattggcgcaaaaggtactgctattttttcgtttcacgccatcaaaaatattacctgtgcggaaggtggcctgattgttactgataatgaaaatcttgcccgccagctgcggatgctgaaatttcacggtctgggtgtcgatgcctatgacagacatacctggggccgtgcaccgcaggctgaagtcttaacgccgggctataagtacaatctgaccgatattaacgccgcgattgccctgacacagttagtcaaattagagcacctcaacacccgtcggcgcgaaattgcccagcaatatcagcaagcactggcagctctcccctttcagccattaagccttcccgcctggccgcacgttcatgcctggcatctgtttattattcgtgtcgatgaacaacgttgtggtatcagtcgcgatgcgttgatggaagcgttaaaagaaagaggcattggtaccgggttacatttccgcgccgctcacacacaaaaatattatcgcgagcgttttcccacgctgtcgttaccgaataccgaatggaatagcgaacgcatctgttcgttgccgctgttcccggatatgaccaccgccgatgccgaccgcgtcatcacagcccttcagcaactcgcaggacaatgagccatgtttgaaatccaccctgttaagaaagtctcggtggttattcccgtttataacgagcaggaaagcttaccggaattaatcaggcgcaccaccgcagcctgtgaatcactggggaaagagtatgaaatcctgctgattgatgacggcagtagcgataattccgcgcatatgctggtcgaagcctcacaagcggagggcagccatattgtgtctatcttgcttaaccgcaattacgggcaacattcagcgattatggcgggattcagtcacgtcaccggcgacttaattattaccctcgatgccgatctccagaatccgccagaggaaatcccccgtctggtggcaaaagccgatgaaggttacgacgtggtagggactgtacgccagaaccgccaggacagctggtttcgtaaaaccgcttcaaagatgattaaccggcttattcagcgcaccacaggcaaagcgatgggtgactatggttgtatgctgcgcgcctatcgccgtcatattgtcgatgcgatgttgcactgccatgaacgcagcacctttatcccgattctggcgaatatcttcgcccgccgtgccattgaaattccagtgcaccatgccgagcgtgagtttggtgaatccaaatacagctttatgcgcctgattaatttgatgtacgacctggtgacctgtcttaccacaacgccgctacgtatgctgagtctgctcggcagcattattgcgattggcggttttagcattgcggtgctgctggtgattttacgcctgaccttcggaccccaatgggcggcagaaggcgtctttatgctatttgccgtgctgtttacttttattggcgctcagtttatcggcatgggattgctcggtgaatatatcggcaggatctacaccgatgtccgcgcccgcccccgctattttgttcagcaagttatccgtccatccagcaaggaaaatgaataatgaaaaccgtcgtttttgcctaccacgatatgggatgcctcggtattgaagccctgctggctgccggttacgaaattagcgccatttttacccatactgataatcccggtgaaaaagccttttatggttcggttgcccgactggcagcggaaagaggcattccagtttatgcgccggataacgttaatcatccgttgtgggtggaacgcattgcccaactatcaccagaggtgattttctctttttattatcgccatcttatttgcgatgagattttgcagctcgctccgagaggtgcatttaatctgcatggttcgctgttaccaaaatatcgtggtcgcgcgccgctgaactgggtgctggtgaacggtgaaacggaaactggcgttacattgcaccgaatggtgaaacgtgccgatgccggggccattgtggcacaactgcgcgttgccattgcgccagacgatatcgccattacgctgcatcataaattgtgccatgccgcgcgccagctactggaacagacattacccgccattaaacacggtaatattctggaaatcgcccagcgcgaaaacgaagccacctgttttggtcgcagaacgccggatgacagtttcctcgaatggcataagtcggcatccgtactgcacaacatggtgcgtgccgttgccgatccgtggccgggtgccttcagctatgttggcaatcagaaattcaccgtctggtcgtcgcgtgttcatcctcatgccagcaaagcacagccggggagcgtgatttctgttgcaccactgctgattgcctgtggcgatggcgcgctggaaatcgtcactggacaggcgggcgacggcattactatgcagggctcgcaattagcgcagacgctgggcctggtgcaaggttcacgcttgaatagccagcctgcctgtgccgcccgacgccgtacccgggtactcatcctcggggtgaatggctttattggcaaccatctgacagaacgcctgctgcgcgaagatcattatgaagtttacggtctggatattggcagcgatgcgataagccgttttatgaatcatccgcattttcactttgtcgaaggcgatatcagtattcattccgaatggattgagtatcacgtcaaaaaatgtgatgtcgtgttgccgctggtggcgatagccacgccgattgaatatacccgcaacccgctgcgcgtatttgaactcgatttcgaagagaatctgcgcattatccgctactgcgtgaagtaccgtaagcgaatcatcttcccgtcgacttcagaagtttatgggatgtgtagcgataaatacttcgatgaggaccattctaatttaatcgtcggcccggtgaataaaccacgctggatttattcggtgtctaaacaattacttgatcgagtgatctgggcctatggcgaaaaagaaggtttacagttcaccctcttccgcccgtttaactggatggggccacgactggataaccttaatgcagcgcgaattggcagctcccgcgctattacgcaactcattctcaatctggtagaaggttcaccgattaagctgattgatggcggaaaacaaaaacgctgctttactgatattcgcgatggtatcgaggcgttataccgcattatcgaaaatgcgggaaatcgctgcgatggcgaaattatcaacattggcaatcctgagaacgaagcgagcattgaagaactgggtgagatgctgctggcgagcttcgaaaaacatccgctgcgccattacttcccaccgtttgcgggctttcgtgttgtcgaaagtagcagctactatggcaaaggatatcaggacgtagagcatcgtaaaccgagcatccgcaatgcccgccgctgcctggactgggaaccgaaaattgatatgcaggaaaccatcgacgaaacgctggatttcttcctgcgcaccgttgatcttacggataaaccatcatgaccaaagtcggcttacgcattgatgtcgatacctttcgtggcacccgtgaaggcgtgccgcgtctgctggaaatcttgagtaagcataatattcaggccagcatttttttcagcgtcggcccggacaatatgggccgccatctctggcgactggtgaagccacagtttttgtggaagatgctgcgctcaaacgcggcatcgctttatggctgggatattttactggcaggtacggcctggccaggtaaagagattggtcatgccaatgccgatatcattcgtgaagcggctaaacatcacgaagtcggcctgcacgcctgggatcaccatgcctggcaagcccatagcggtaattgggatcggcaaacaatgatcgacgatattgcacgcggccttcgcaccctggaagagattatcggtcaaccggtaacctgttctgccgctgctggctggcgtgctgaccaacaggtgatcgaagcaaaagaagcgttccatttgcgctacaacagcgattgtcgtggggcgatgccgtttcgtccattgctcgaatcaggaacccctggcactgcgcaaattccggtgaccttacccacctgggatgaagtgattggtcgggatgtgaaagcagaagattttaacggttggttactcaaccgcatccagcgagataaaggcacgccggtttataccattcatgccgaagttgaaggctgcgcttatcagcataattttgtggatctcctgaaacgcgcagctcaggaaggcgtgacattttgccctttaagcgaactgttatcagggacgttgccgctcggacaagttgttcgcggaaatattgccggacgtgaaggctggctgggttgccaacaaattgcgggtagtcactgatgaaatcggtacgttaccttatcggcctcttcgcatttattgcctgctattacctgttaccgatcagcacgcgtctgctctggcaaccagatgaaacgcgttatgcggaaatcagtcgggaaatgctggcatccggcgactggattgttccccatctgttagggctacgttatttcgaaaaacccattgccggatactggattaacagcattgggcaatggctatttggcgcgaataactttggtgtgcgggcaggcgttatctttgcgaccctgttaactgccgcgctggtgacctggtttactctgcgcttatggcgcgataaacgtctggctttactcgccacagtaatttatctctcattgtttattgtctatgccatcggcacttatgccgtgctcgatccgtttattgccttctggctggtggcgggaatgtgcagcttctggctggcaatgcaggcacagacgtggaaaggcaaaagcgcaggatttttactgctgggaatcacctgcggcatgggggtgatgaccaaaggttttctcgcccttgccgtgccggtattaagcgtgctgccatgggtagcaacgcaaaaacgctggaaagatctctttatttacggctggctggcggttatcagttgcgtactgacggttctcccctggggactggcgatagcgcagcgggagcctgacttctggcattattttttctgggttgagcatattcaacgctttgcactggatgatgcccaacatagagctccgttctggtactacttgccggtcgtcattgccggtagcctgccgtggctgggattactccccggtgcactgtacgctggctggaaaaaccgcaagcattccgcaaccgtctatttgttgagctggacgataatgccgctgctgtttttctccgtcgctaaaggcaaattgcccacctatattctttcctgctttgcacctctggcaatgctgatggcgcattacgcattgctggctgcaaaaaataatcctctggcgttgcggattaatggctggattaatatcgcttttggcgtcactggcattattgccacatttgtggtctccccctggggaccaatgaacacaccggtgtggcaaaccttcgagagctataaagtcttttgtgcctggtctattttttcgctatgggcatttttcggctggtacaccttaacaaacgtcgaaaagacctggccttttgccgcgctttgcccgctggggctggcgttgctggtaggattttcaattcctgacagagtcatggaaggaaaacatccgcaattttttgtcgagatgacacaagaatcacttcagccaagccgctatattcttactgatagcgtcggtgttgccgcaggtctggcatggagcctgcaacgcgatgacatcatcatgtatcgccagacaggtgagttgaaatatggccttaattatccggatgcaaaagggagatttgtcagcggtgatgagttcgcaaactggcttaatcaacatcgtcaggaggggattattacactcgtgctttcggttgaccgcgatgaagatatcaatagtctcgccattccgcccgcagatgtcatcgatcgtcaggagcgtctggtgctaattcagtatcggcccaaatgatctggttaacattagtctttgccagcttgcttagcgttgccgggcagttgtgtcagaaacaggcaacctgctttgcgacggtaaacaaacggcgcaaacatatcgtgctgtggctgggactggcgctggcttgtcttggccttgcaatggtgctctggctgctggtcttgcagaacgtaccggtaggcattgcctacccgatgttaagtctgaattttgtctgggtaacgctggctgcagtaaaactgtggcacgagccggtatcgctgcgtcactggtgtggggtggcgttcattattggcggcattgtgatcctcgggagtacggtgtagtgggcctgatgtggggattattcagcgtcattatcgcctccgctgcgcaattaagcctgggttttgcggcgagtcatctgccgccaatgacgcacttatgggattttatcgcggcgctgttagcttttggcctggatgcccggatactgttgctcgggctgctgggttatctgctttccgttttttgttggtataaaacactacataaacttgcgctaagcaaagcctatgccttgctcagtatgagttatgtgctggtatggattgcttcaatggtacttcccggctgggaagggactttttcgctgaaagcactactgggagtagcctgtattatgagcgggttgatgctgattttcctgcccacaacaaaacaacgttactgagttttccctgccgctttacactgccgttcccactcatcggggctataacagcttgcagaaaggactttcaccgtgtgcagcttttcacgattaatacagtaaagcgcattctgcaaaggcgagagtaaatcccccactttcacggcgaagtcactcttcacttcggcgatcatttttatcgcgccgccagcatcgcagagcataattacatgtctgttatcttgtttattgcagcacgattttttgaccagccattccattgcattatcctgtttgctaagagttttcacatcaatttacagattaacagataaactctttatcaacggcaatggaatggcagaaatgagaagtgaaacggagggttaattattgctggcgtttcacccactcttttagcgcctgacgtgaaattttaataccgccgtttttcagctccggcggcagagtcagccagcgcaccggttgttgaaaacgagccagcttatctttcacccattcgtcaagatcaacgctttgctggtcatactccaccaccgctaccggccgatgaccaaactccttgtcggcaacgggaacgataaacacctgcaaaaccgcaggatgtgcagcaataacgcgctcgacttcttccggctgaataccctcaccgccactgaagaatagattgtctaaacgtccgacaatggtcaacttgccattatacatctcaccgcgatcgcgcgtggcgtaccagccttcgtcattaaccagtggaacccgttgcccattacgccagtaaccttctgccatactggcagcccgcagccacacttcatcattaacgattttcacttcccgacccggcagcggcgaaccaacgtctgccagaccgtcggcttctttcgcacacaccgtggaggcaaactcggtcagaccatagccgcaaaagcaccgaatcccctgctcgcgcgcctgttccgtcaactcgaccgggatagccgcgccgccaagtaaaaccgctttcagggaaacggaactacggttaaccagcaaacgccagagttgtgttggcaccagtgaagcgtgagtacaacctgccagcatttgctccaatggctgtttatcacgcaccgtcatccgcgcaccagcgtataaccagcgccacataattccctgaccggagacgtgaaacagcggtaaagagagcaaccagtcatcgtgatcaccaaaaggaatcagcgataacaccccttcggcgctggcaagatgagcctgataagtatgaacagcggctttcggcaagccagtggaaccagaggttaacgtcattgagcacagacgcgtcggctgccacgccgcggcatgtgcgccttcaaccagctgaatgtgcagcgacgctaacgccggaaacgtgttttccccttccggcaccagcgcaaattgcagcgtaagattgggcagcaattcctcaagcagcggttgcggcagctgagggttcacgggcaacacccgcgccccgcattgcagtaacgccagccaggccagcagcgtttgcggcgtattccacgcccgcaacatcacgccgctgccctcaaccacaccctgcaccgcaaagctggaggctaattcatcgacgcgagcacaaagctcgcgccagttgagttgctcgtcattgagacgtaaggcgatggcttctccccgcacttgccgccagtgacgccacggccagtcagagaagatcataacagctgctccagtgcatcaacgtccactaacggcagcaggctccccggccagcgacgaacctgctgcgcctgcatcagatccagcgtgtccagtcccggaatggtgtctggcgttaaccaggcagcaatccgcgccagttgcgttagacctaagctcgactcaatggaagaactgatcaccgccgtcagccccagcgcatgcgccgcctgcacttgctcgcgtactttatccaggctgcccgtgagcgtgggtttgataactaccgcgcgcacgccctcttcagctacaaaggcaaaatccggctcgcgcaagctttcatcccaggcaatggcaatgccggtttcacgggcaaacgcacgcgaatcatcgcgggttttgcacggctcttcgagaaacgcgatgcggtggcgataatccgggttaacgtatttggcaaactgctggcctttcagcggtgtccaggcgcggttcgcgtcaagacgcaaatgcagatcaggaattgcctccagcaacagattcaccaccatgccgtcgcgcacggcttcgtacaatcccactttgaccttcgccactttctcgccaggcatatcggcaagtttgaggatcagatcgtcaggatcgccattacacagcggtgccgcacggtaattggccgcctgcgggagcgtatctgccagctccgccaatgcacaacttacgccaaaggcaacggaaggcatctgcggtaattcgcaatcgcctgccagccagttatttacccaggcaagcagcacactttgcgcctcttcccaggtttcctgactgaagcccggcagtggggagatctccccccacccttcgcgctcgccctcacgcaggcaaacatacagcccgtcgcgggtttttaaccgcctgtcgcgcagaaccacccccgcgtccatggggatctgccagcggtatacctgcgcgctacgcattacggattccgtttaaatttgctgaaatcaggctgacgtttctggttgaaagcgttgcgaccttcctgaccttcttccgtcatatagaacagcatggtggcgttgcccgccagctcctgcagccccgcctgcccgtcacagtcggcgttcagtgcagctttcaggcagcgcagcgccatcgggctgttttgcaacatttcgcggcaccaacggacggtttctttttccagatccgccagcggtacaacggtgttcaccagacccatatccagcgcctgtttcgcgtcgtactgacggcacaggaaccagatttcacgcgcttttttctgtccaacgatgcgagccatgtaggaagcgccccagccgccgtcgaaggaaccgactttcgggccagtctgaccgaagatggcattatcagccgcgatagtcaggtcgcacatcatgtgcaggacgtgaccgccaccgatggagtagccagccaccatcgcgacaaccggttttggacaggtacggatctgacgctggaagtccagcacgttcaggtgatgtacgccggaatcatctttatagccgccgtaatcaccacgtactttctggtcaccaccggagcagaacgctttatcgcctgcaccagtcagaatgatcacgccgatgttgtcgtcataacgcgcatccgccagcgcctggatcatctcttttaccgtcagaggacggaaggcattgcgcacctgcggacgattaatggtgatttttgcgataccgtcggtggatttttcataacgaatgtcctcaaaaccttcggagcagtcgtgccattcaaccggtgcgtaaagcattgcttcatcaggataaatcatattgtgtcctttagtcagaaacgcaagatctgcgccagacttgcgattacgccagcgggattttcccggtgcgcgttatgtccggcgcgaggaatgacatggcagtcggcagccagttccgccgccagagcgcggaatttgctgtcacgttcaccacataaataataaaacgcaaatgtgcgggcgctaaggttagcacgtaaatcgggctggacggcgagagaagtcgcctccagcatggcggcaagggttgcgccattattgttgctgcgcagcgccaccagctcccggcgttgatcgtcattgagcgaggcaaaaacaggctgttgataccaatcggcaaataccgccgttaacggttctgtacgaaaacgctgcgcccattggcgatcggaacgctgacgttccgcgcgttgttcagcattttgcaatccaggatgcccgccttcgacaacaactccacaaagccccgccagctcctggcaagccgccatcatcgccacccgtccgccaagcgagtaccccaccagccagaagttaaggatgttgtaactaaccagcgttttacacaataagccggtgacatcatcaaatccatcgacgctgatcgtcgctgaaccaccgtgacctgggagatcaacatacaaccgcgagtagtcggcaaacgcctcgcccacttcttgccattcatggcaatcgccagaaaaaccgtgcaaaaacaccaaccagggtaaacctggtttgccgtgttttgcctgcgcgtgcaggatcataaatggcttacctgcgccagaagttgctggagcgtttgcgcaccatcggtgtcgttaaccaccatttcaatcaccgtggtggtcggcgtacgccaggcatcgactagtgtcgtttcaagttcctgccagttttgcggacgatgatatttcagctcgaacatcgcggcggcgtgctcaaaatggacgttttgcggcatcagatagaaacgctcgcgctcgcttttcggcgttggcaacagcgaaaaaatttgcccgccgttgttgttcaccacaattaataccagcggtgcggaaacctggcgcaataacgccagcgcgttgagatcgtaaagtgcggagagatcgcccacaatcgccagcgtcggtttgccgcttgcccgctgaacgccggcggcagtcgagagcagcccgtcgataccgctggcaccacggttgctgtacaccgggtaacctgccggaagttgcgaaagcgcatcaatcagacgcaccaccaggctgttaccgacaaacaattgcccctgttcaggcaagtagtcgctgatgcgatgcgccagttgcgcttcgccaaacgcatcgcgacgggcaataaccgcctgcattgcctgttccgccaggcgcgggatttcaacgcaccagggctggcgtttttctgccggatgcagctccagccagtcggcaatattggcaattaagcgacgtccgcgatggtgtgccggatcaagtcgcccttcaatgtcatcaacaatccagtactcttctggttcacagcttgcctgccattggaggagtcgtttccccgtcaggctgcttcccagttgcaccactatttgtgcctgttgcagttcgctggtcgctttggcattgcctaaccagagatcggcacacggcagcggctgtccggtttgcgacagcacgtcgccaatcagcggccagccaagagtttgcgcccacagtgcaacttttttgccctcttccgcactcatgcgcccggcaaccaccacgccgcgcttttgtcgccagaagaaccagtcacgctgtttttcactttcccgacgaggcgcttcacgcagccacggtttgtcgtcctgccaccagtcgcccagccgctgttgccagctaatcccggtgtcgtccatttcgccatacagcggttcagcaaacgggcagttgatatggactccaccagcatgaagcgtaccgagagcgtggtcgatggtagaaaccagccaacgtgcggggatatcctgggtcgggcgcggcagtgaaatactgtgcgtggggtgagaggcgaacattcccggctgacgaatcgcctgattcgcgccgcagtcaatcagctccggcgggcgatcggcggttaacaggatcagtttttctccggttaacccagcttcaatcagtgccggatagagatttgctaccgccgtgccggaggtcacaatcaccgccaccggctgcttgctgactttcgccagccccagtgccagatgccccagtccacgctcatcgaaatgggtatgatgaataaatgcggaattctccgccgccgctaacgttaacggtgtagaacgcgagccaggggcgatacagatgtgtctgacgccgtgacgcgttaatgcttccagaatgaccgccgcccagcgtcggttaaatgcgcttactgacatgagtttgtccggtatcaatattgcggctaagtataaggagctacaaaaatagattattgatatgaatcggtaatgatgcgactcattactattccatttgtaataaagtacgcagccctgccgctttgttgtcgatttcctgccactcttgctcggggtcggaaccacggacaatgcctgcgccagcatatagccgcacgatattgccgctgatttttgctgagcgcagggaaacgcagaattcactttgctgtaatgagagatagcccgcagaaccggcgtaccattctcgagtgaacggttcgtgacgggcgataaactgtcgcgccagatcgcgcggtaagccagcaactgctgccgttggctgcaactgatgtaaacagatcacatcatccgctttgttgagtgaagtccagatacagcggcgaagatgctgtactttacgtagacgcagtacctgcggcggtaaaacatccagcgtttgggtatcggcctgcaatcgttggcagatatcttccaccaccaacatgttctcgcgctggtttttatcatccgccatcagccactcacctaactgctgcgcctgcttatcatcaggatgatttgctaccgttcccgccagcgcttcggtacgcagcgctttgtcacgccgccgccataaccgttccggtgaagaaccaagaaaagcattttcgccatcaaaggccatgtaaaaatggtagcaattcagattgagccgacgactggcagccatcatcgctgccgcattgaccggacttgcgaaatgcaggtcggttgcccgagcaagcacaactttgtcgagctcgccttcggcgatggttttcgttgccagttcgattaattgcgtccagcccgttttgtccggccagtgttgttctcgcgtggtggtaaaatgtaatccaggcaagggcttgatactcaccagtgtggcgataaattcttttgccttgattgcatcgtgctgaagggagctttcgctgaatagcgtcagccgcagcgtggctttaccgccacaacgtcgccattccaggcgtggtaaaagtaaattgccctgcgacgggtcaaacgcattcaacccccagatgcgtaagtcggcgtgttccgggtgctggcgaagaaaccgttgtgcctggtccaacgacgtaaaacgggttatcgcacccaggacggcagcttcttcatcaccattacgttgttgccagtagaattgcgggtacgtttgctgactggccagccagctcaaggcatcaaaagcgtctttgagagggaaaggaatatcgataacccgaatgccgggtgtcgccggaatctcttgcgacaaatggcgcagtagattttccagcgccgtagtaagtgattgcacgcggacctctccctgttaaaagcctcacattatacggggtacgacaaaaaaaatgcagtaccccggtgtagggaggttttaacggcgtgccagcaacagtcctagaaccagcccaacggccgcacccacaccaattccttgccagggtttttcgtggacgtagtcatcagcacgataaacagcctgcttcgcccgatagtaataactgtctgaagcctggctaacccgttttttcacatcatccagcgctttttctgcacgcgctttcagctcaacatatttctgatcggcgggatcgccagaggagcggagcacctcttccagtgtttcactaagcagcgtcaggtcatcatcaatacgtgtatcaccaaactgattagacattctcgttctccatttgtgtaaaacctgtcactaactatagacaagggttattgattacgcctgaattacctcgcgtgccatcccaatgtgtgggataccatcttcttcataaatatcggtcacagggatgaaaccaaattgcccataaaagttttgtaaatgcgcctgcgcccccagataaatcggcttctccggccagcggcgagtacacgattccagcgccttactcatcaattgctgaccgattttttcaccgcgtaaggcttcgctgacaatcacccgaccaatcacaacgggttgcagttcgtcgtcacttttcagaatcctcgcatacgccaccagtgtcccgttatgccaaccgagaatgtggcgattttctccctccagatcgtcaccatcgatatcctggtaaggacagttttgttccactacaaataccgcacaacgcagttgtaataaggcataaagctgagaaacggataaatcagaatgatgcagatcttgccagtcgatcatggaaggctcctttgtgctgtttgctttatactagccggaatattttcagcagcgtgatgaactcatggaattaatttttttaggtacttcagccggtgtgccaacccgtacgcgtaatgtcacggcaatattgcttaacctgcaacatccgacccagagcggactttggttatttgactgcggtgaaggcacccagcatcagctactgcataccgcctttaaccctggaaaactggacaagatttttatcagtcaccttcatggcgatcatctctttggtttacccggcttactgtgcagtcgttctatgtcaggcattatccaacccttaacgatttatggtccgcacggtatccgtgaatttgtggagaccgcgctgcggattagcggctcatggaccgattatccgctggaaattgtcgaaattggtgctggcgaaattttcgatgatggcctgcgcaaagtgaccgcttatccgatggaacacccactggaatgttatggttatcgtattgaagaacatgataaaccaggtgcattaaatgcccaggcattaaaagctgctggcgtgccgcctggcccgctgtttcaggaattaaaagcgggcaaaacaatcatgctggatgatggaaggcagattaatggcgcagattacttagccgttccagtgccgggtaaagcgctcgctattttcggcgataccggcccctgcgatgccgcgctggagctggctaaaggcgtcgacgtaatggttcacgaagcgactctggatatggcgatggaggccaaagccaacagtcgcggccatagttctacacgccaggcggcggcactagcccgtgaggctggagtcggtaagctaatcattacccacgtcagctcgcgctatgatgacaaaggttgtcagcacctgttacgtgaatgtcggtcaattttcccggcgactgaactggcgaatgatttcgcggtgtttagcatttaagtcgaaagcggtggttagttagcagattaatttaacgataccaacgcatttatttgacattttttcatctgtttgccggatacgtttgatgtcgatatcaggcaaacagaattatcatttttagttttgtgaattgtccagatctttcgccagtccaatcaggcgaataaattccgctctgtaaccctgtggatcttccccttttgccttctgagcccactgtttgatctgctgccaggaggtattattcaggtattcagaaccgcgtaacttttgcccatatgcagccactgctgcgcgaaaacgcatatcttctgaaggtgcctttattgcgaatgccaacgggaattcaactaactgactttcttttccctgtggggatttccaacgaatctttaaccaggcaagttcttttgttttgtccgatttcgctgatttgttatccggggcatagcgtaacttatcaattgatgctttttgccctttcagcgttaattcaaataaaaatgttatatgtttacctgcgccaatatcacccgcatcaacgttgtcgttattaaaatcctctgccctaagttggcgcttttcataacctatctgacggtattccgttacccacgcggggttaaactcaatttgcgctttgacatcttttgctacggtaatcaacgtctgccgcatttcactgttcaacactttctgcgcctctgagagggtatcaatgtagctatagttgccgttaccaacatcggcaattcttaccatcattgcctcgttataattgctatcccccacgccaagcgtcgacagagtaacaccggactcacgctgttttttgaccattgattcaatcgattttggatcgtcaatgccaacgttaaagtcaccgtcagtggccaataaaatgcgattgataccacctttaataaaccccttcgctgcctgctgataagccatctccagcccggcaccgccattggtactgccttctgcatccagcgaatcaattgcagcattaatttccgccttgtgactaccggagatagaaggcaacgcaatacgagagtcgccagcgtaggtcacgatggcaatgttatcctgctcacgaagttctttgaccaataatttcaacgaagactggataagtggcaaacgttcatcagaaatcattgaaccagacgtgtcgataagaaagaccagattagaagcgggtaactcttcacttttgcgatctttcgccaggatatcaactttcagcaatgttcgctgttcattccagggtgcaggtgccaattcgtagcgcatagcgaaaggtattggcttagaggccggaatagattgtttgtctttgatatcccagtcagacgggaaataattgactatctcctccacccgcacagcgtctggcggaggtaacagcccttgattaaggaaacgccgcacattcgcataactgccggtatcgacgtcaaggctaaacgtcgccaacgggttttgcgctacctgcttaaccggattatcatcgaactgctggtagcgagcggttcctggatttgcgatttgggaggctgctttttctctggctgcatgttgatattttggagccgcctgcaatcgccccagcaaagcctgtttgtctgaatattgttgcacttcttgctgggctaaggctttcgcgtctgcagcggctttggcggcgctttgctcagccacttttgttgccgcttgttgcgcggcaagcacttgctggtcagtgggtgtagtagattgttgttgctgacttttcttatcctcaggttccggcccacatcctgacaaaatcaaactacttataagcaacatgattatatttttatttcgcatataaaatccttttaaataaattcagggccccgacataaaatacactctttgtataatcctgctaatcttaataaaatacaatatcgaaacccataacaaataatgattcaacaacgcaacccattaataatttgcatatgaaaaaaaataaattttgcttttattatattatttctgttttcactccctctgattattttttaccaaccctgggtgaatgcattaccgccaacgccccgacacgcaagtcctgagcaattagaaaaaacagttcgttatcttacacaaacagtgcatccacgtagcgccgacaatattgataatctgaataggtccgcagagtatataaaagaggtctttatcagtaacggtgccagagttaccgcgcaggatgtccccattacgggtggcccctacaaaaacattgttgctaattatggtcctgccgatggaccgctgattattattggtgcgcactatgactctgtcagtagttatgaaaacgatcaattgacctatacgccgggcgcggatgataacgccagcggcgtggcaggattactcgaactggcacgtttgttacagcagcagactccagggattggcgtccaactggtcgcctatgcgtcggaagaaccgcccttctttcgtagcgatgaaatggggagcgcggtacatgcagcttcgcttgagcgtccagtgaaattaatgatagcgctggagatgattggttattacgactctacgcctggtagccaggattacccttacccggcaatgtcctggctttatcccgatcggggagactttattgccgtggtcggcagaatgcaggatatcaacgccgttcgtcaggtaaaagcggcattgttgtcatcccgggatttatctgtttattctatgaatgccccaggttttattcccggtattgatttctctgatcaccttaattattggcaacacgatattcccgccgtaatgattactgacaccgctttttatcgtaataaacaataccacttgcccggtgatatcgcagacagattaaattatcagaaaatggctcaggtagtggatggagttacaaccttgttatacaacagtaaataataaaaatttctcgaggcggatccagaaaaagcaacatgcgcattttattttctttcgtctgttttaagatgcgaaacatgaaattcaacggaggaaaaataaatgggaatgattggctattttgcagaaattgactcagaaaagattaaccaactgcttgagtctactaaaaaacctttgatggataatatacatgacacgctttcaggattacgccgactggatattgataaacgctgggattttttacactttgggctgacaggcacctctgcgttcgatccagcgaagaatgacccgctgagtcgcgccgtgcttggtgaacacagcctagaagatggcatagatggcttcctgggattgacctggaatcaggagttagccgcgacaatcgaccgactggaatcactggatcgaagtgagctgcgtaaacagttttccattaagcgactcaatgaaatggagatttatccgggagtaaccttttcagaagagttagaggggcaactctttgcttcgatcatgcttgatatggaaaagctgattagcgcgtatcgacgtatgctgcgacaagggaatcatgcgctgacggttattgttgggtgatggtgtcagggcaccaaaaaaaaccgccgaacatgtcggcggctttctgacttacaaactgactgtttacatcagcggcattgctaaccgcacaatgctaatcagcggttgtggccatacacccagcaccagtaccaacagtgcagagatcagcaccacgataccgcctgcgctgtactgccagtttgatggtgcatcgcgacccggttgttccggagcgtgcaggtataagctcaccgccacgcgcaggtagtagtaaaggccgattgccgaaccaacaaccacggcacccaccagccaccacaagtgtgcctggacaccgaccgccagcacgtagaacttaccgataaagcccagcgtcattgggataccagccagtgaaagcatcatcaccgtcatcactgccgcgaggatcggacgatgccagaacagaccgcggtaagagaacagggaatcagcatccgggccacgatacgggctggacatcaggctgaccacgccgaacgcgccgaggctgctgaacagataaccgaccaggtaaacccctaccgcttccatcgacatctcgccggtttgcagcgcaatcagcgccaccagcagatagccgaggtgagagatagatgagtaaccgagcagacgtttgatattggtctggctcagcgccatcaggttaccgaagatgatggaggcaaaggcgataatcgccagcactacgcgaatcgcttcactgtcacccaccggtgcgtaaaggaacaaacgcatcaccacgccgaagatagcgattttgctcgccgtcgccaggaaagtggaaaccggcgcaggcgcgccctggtatacgtctggcgtccacaggtggaacggcaccagagagagtttgaaaccgaggccaacaatcatcaggccaaaacctgccagcaacagcggctcgttgagcataccgtcgccgaggtttttacccagtgcgacaaacgacaggtcgccagactgcgcatacaccagcgccataccgaacagcaggaaagaagacgctgcggcagaaaggatggtgtatttgatactggcttccagcgaacgtttctggcggaaagcgtaaccgaccaggccaaacagcggcaaagagatcagttcgataccgaggaacagagacgccagatggttggcattcgccagcaggatcccgcccagcgcggcaattaacaccaacaggtagaactcgtccttgttgtcgttatagccttcaagccacgggtaggcgaaagtacaggtggcgaggctcgccaacaataccagcccggtgtaaagcatggcgaaaccatcaacgcgcatcagcggcgtaacgtccatagcgcccgcctggccgacaaaccagagcgaaaccagcgccgcgttaagcccaataaccgagagcgtagcgttgaggaaatgattgcgtcgccacgcaatggagagcatcacaaccaccaccgtcaagccgacgatcagcaacggtagcagtgcgatcaggttttgtggagttattgtcatggcgatttacggccttgtagtagtaacggaattaacaaaccactgctggatattgccaatcgcggagtgcgaggtatccagaatcggctgcggatagaagcccagcagtaccagcagcaccaccagcaacaggatcataaacagctcacgcagcgacatccctggcagttcctggctggcaatctggcttttcgctttgccgaagtaagcgcgatgcagcatcgccagcgaataaacagatgcaaagaccagcccaaaggtagagataacggtaatcaccgggacaacctggaagctgccgaacagaatcataaattcgccgacgaagttaccggtgccaggcatcccaagcgttgccaccgcaaagaacagcgacagtgctggcagccatttcattttgctccacagaccgcccatcatgcgcatgtcgcgggtatggatacgttcataaagctgaccacaaagaataaacagacccgccgccgacaagccgtgcgcaatcatctggattaccgcgccctggtaggccaactggctgccggtgtagatagcaatcagcacgaagcccatgtgggaaaccgaggtgtaggcgatcagacgtttgatatcggtctgggcgaaggccatccacgcaccatagaagatgccgataacacccagccacatggcgattggcgcaaactctgccgacgcgttcgggaacagcggcaaggagaaacgcaacagaccgtaagcggcggttttcagcaagatccccgcgaggtcaacggaaccggcggtcggtgcctgggagtgcgcatccggtaaccagccatgcagcggaaccaccggcattttcactgcgaaggcgatgaagaagcccagcatcaacaggtattccacgccgttagacatcggcgtattcagcagctcttcatagttgaaggtccagacgccggtcgcattgtagtgaacgaaaaccagcgccaggatggcgatcaacatcaccagaccactcgcctgggtgtaaatgaagaacttggttgccgccgtgatacgcgttttaccgtcagaggctttatgcccccacagtgcgatcaggaagtacatcggcaccagcatcatttcccagaagaagaagaacaggaacatgtcgatggcaaggaacacgccgataacgccgcccaggatccacatcaggttgaggtggaagaagccctgatatttttcgatctctttccacgaacagagtaccgccagcacaccgagcagaccggtcagcacgaccatcagcaacgacagaccgtcaatggcgagatgaatagagataccaaaacgcgggatccacggcatgtcgaattcagactgccactgcggaattccggcggattgcgtcagtgaataaccgccctgcaaccacagttgcagcgacagcgccagcgtcaatcccatggttaccagcgcgatccagcgcggcaccttgacgccaaagcgttcggtctgccagcacaggaagccgccgataaagggaattaatattagccagggtagtaacatggcgatctttattccttgtaaaagtcccgtcaggaccggattttcaacgaattctcacgacagaaaattctcttcggactgggggtagtgtcggatgcgccgcgaagacggcttatccgacctacgttcttatatgcccaggggcaatcccacaatccttaactcaacgcagtaccatcaacagtgccagcaccacgaccgcaccgatgctcatggatgccacataccagcgcagataaccgttctcgcttaacagcagacctttacctgcaaagcgggaaaggacagccgggatgttcatcattgagttcagcggatcgcgtttcagcaaccaggcaatacccaggaacggcttgacgaacactttgtcgtacagccagtcaaagccccaggcgttgtaccaccaggtacccagcagacggcccggcgcactgttggcgatggaggtcaccagagtacgtttacccagccatagccaggcagccagcagaatgccgaccaccgcgaccacgccagaggtaatttccagggtcaacatgctgccgtgcgccagctccgtcgtttgcggaagcacgccctgcagcggcggtacaatcagtgcgccaacgaaggtggaaaggatcagcagcacaatcagcggcaggctgtgagttacccctttcacggcgtgagcgtgaatttgttcttttccgtggaagacgatgaaaatcatacggaaggtgtaaagcgaggtcataaatgcaccgaccagacctgccaccatcagattgatatgtccattcgccatcgcacccgcgaggatctcatccttactgaagaagcccgcagtgaccagcggcagtgccgacagtgctgcgccgcccaccaggaagcagagataaaccagcggaatagatttacgcagaccacccatcttaaagatgttctgttcgtgatggcaggccagaatgacggaaccggatgccaggaacagcagcgctttaaagaacgcgtgggtcatcaagtggaaaatcgccgcatcccatgcctgcacgccaagcgcgaggaacatgtagccaatctggctcatggtagagtaagcgagaacacgtttgatgtcggtctgtaccagcgccgcaaaaccggccagcagcagcgtaaccgccccaacaatgcccaccagatgcagaacttccggcgtcatcaggaacaggccgtgggtacgggcgatcaggtagacacccgcggttaccattgttgcggcgtggatcagcgcggagacaggcgtcgggcccgccatcgcgtcggcaagccatgtctgcaacggcaactgagcagatttaccgaccgcaccgcccagcagcatcagcgtcgcccacatcagcatgttattgccgtcagcaaagtgcgctggtgccagttccaccatttcgcggaagttcagggtgcccagttcgttgtaaagaatgaacagcgcgaaagcgaggaagacgtcacccacacgggtcacgacgaacgctttcattgccgctgcgccattcttcggatcggtgtaatagaaaccgatcagcagataggagcacaggcccacgccttcccagccgaggtacatcagcagcaggttgtcggcaagcaccagaactaccatgctggcgatgaacaggttggtgtaagcgaagaagcgagagtagccctcttcaccgcgcatataccaggaggcgtacatgtgaataaggaaacccacaccagtgaccaccgagagcatggtcagcgacaggccgtccagcaccaggttaaaaccgatgttaaagtcgcctaccgacatccacgtccacagcggctggctgtatgcctgctcaccgttagcgaagaagtcaacgccgataaaggcagttaccagcgccgccaggcccacagagccaacgccgacgatcgccgagacgttttcagaccagcgcccacgggagaacgccagcaggacgaagccaatcaatggcaaaataatggttaaggcaagcatgttcatccgcgcatctcacttactgaatcgatgttcaggttctggcgacgacggtgaagttgcagcagcagcgcaaggccgatactcgcttccgccgccgcgaggctgatggcgagaatgtacatcacctgaccgtcggtctggccccagtagcttccggcgaccacaaaggccagcgcagaggcgttaatcatgatttccagaccaatcagcataaacagcagattgcgacggataaccagaccggttaagccaagaacgaataagattgccgcgaggatcagtccatgttgtaaggggatcatgcgtgctcctccgtttttcttttcgcgctgtcgtctttacgattgctcagcacttcacccgcacgctcttcacgaccgacgtggaaggccacaaccagacccgcgagcagcagcatagaagccagttccaccgccagtacgtaaggcccgaacagcgtaatacccactgctttagcactgattggcgtaccgtcgataccttgatcgttaacaccgagaatggcgtaaacaatcaccaccagcatgatggctgacaaaattgccggaccaatccacacctgcggtttcagccactggcgttcctgttcgatttccgaaccgcccaggttgagcatcatcaccacaaacacgaacagcaccataatggcacccgcgtagacgataatttccagcgcaccggcgaagtaagcgcccagcgagaagaacaccccggaaatcgccagcagcgaaataatcaggtacagcagtgcgtgtaccggattggtatgggtgatcactcgcaaggtcgcaagtatggctatcaggccacagatataaaaagcgaactccattgcccctctccttacggtaacaggctcttgacgtcgataggcttggcttcgttctctgcttcgcccttatctttgccgtcgattgccatacctgccatccggtagaagttatattccgggtatttgcccggaccggagatcagcagatcctctttctcgtaaaccagatcctggcgcttgtattcccccatttcgaaatccggggttaactgaatcgccgtggtcggacaggcttcttcgcacagaccacagaaaatgcagcgtgagaagttgatgcggaaaaattccggataccagcgaccgtctttggtttctgctttttgcagcgagatacagccgaccgggcaggctaccgcgcagaggttacaggctacgcaacgctcttcgccgtccggatcgcgggtcagaacgatacgaccacgataacggggcggcagatagaccggctcttccgggtacattcgcgtttcgcgtttggcgaacgcgtgcaggccgatcatccagatactacgaacctgggtgccgaaacctactaacaattcttttaaggtcatggtcttattgccccttattgcgcctgccagagaatgacagccgccgttaccagcaagttgatcagcgtcagcggcaggcagattttccagccgaaggacattacctggtcataacgcggacgcggtaacgacgcacgaatcaaaatgaacatcatcataaagaacgcggttttcagcgcgaaccagatgaatggcggtaacaacgggccttgccagccaccgaagaacagcgtcaccatcagtgcagagatggtcacaatcccgatgtattcgcccacgaagaacagaccgaacttcataccggaatattcaatgtggtaaccatccgccagttcctgctcggcttccggctggtcaaacgggtgacggtgacacaccgccacgcccgcgatggcaaaggtaataaaaccaaagaattgcgggatgacgttccacacatgcgcctggctgttgacgatgtcggtcatgttgaatgaaccggcctgcgccaccacgcccatcagggaaagcccgaggaacacttcgtagctcagggtctgcgcagaagcacgcatcgcacccagcagcgagtatttgttgttacttgaccagcccgcaaacagcaccgcgtaaaccgccagacctgccatcatcaggaagaacaaaatcccgatgttcaggtcggcaaccacccaacccggactgactggcacaattgcaaaggccagcagcagcgaggtaaaggcaatcatcggtgccagggtaaagatgacgcgatccgagaatttcgggatccagtcttctttaaagaacattttgatcatgtccgcaaccagctggagcgaaccgccccagccaacacggttaggtccataacggttctggaacagacccagcaggcgacgttcgccaaagctcatgaatgccccacaggtgactaccaccagcaggatcaccaccgctttaaggacggtcagcaagatctcaatcagttccggtgatatccaactcattgttgtgcctccttgagatcctcaagatgcgcgccagccagcaccggagcaatgccggacatacccatcggcaagcccacctgccctgccgtcagcccttcggagatttcaaccggcagcgtgaccatgttgccatcgtaactaaaggagacgcgtgtacctgcgttcacccccaacttcgcggcatccgctgggttgagtttgatgtacggctgcggcatacggctctggaagaccggagcacgctgtgacaattcatcgctgccaaacaggtggtagtacggcgcgatacgccatttcccgtcctgcggctggaagcgtgccggtacgctggtgaagtaatccagactgttttcgctggtttcaaacagacgcacgcccggatcgccaaaacgcagtttgccgcccacttcgtcctggaatttgttccacgcctgcggggagttccagcctggcgcccaggcaaacggcacttgcgaacggtgcgcggtcggctggttgttaccttccatcgagaaggtaaacatggtgtcaatatcctgcggctgacgcggctcatgaacgctgatattggcgcgcatggcggtacgaccactatagcgatgcggttcacgggccagtttctgcccacgaatacggaatgtcgcatccggcgcagcatctttgatacctgccagttccgggattttcgccacaacagcgtcaatcacgtggtcgagctgcgtccagtccacttcacggctcagcagggtgctatgcagcgagtgcagccagcgccagctttccagcatgacagtttggctgtcgtaataagccggatcgtaaacctggaagaaacgttgggcgcggccttcgttgttgatcaccgtaccgtcgctttcagcaaagctggcagcagaaagcaccagatgagcgttttccataatcgctgtgcgttgatggtcaaccaccatcaccagcggcgctttagccagcgcagcattcacgcgggtagcggaagcgtgacgatgcagatcgttttccagcaccaccaccgcgtcggcgcgtccggtttccagttcggttaacgcttcttcaagcgatccaccgcccataatgcccagccccatgctgttgacggaacgggcaatcatggtgataccgacgtcagcgccgcgacctttcagggctttcgccacgttagccgcagcctgaatcacttcagcgctaccagcgttcgtcccggagataatcaacggtttcttcgcaccagccagtgcctgcacgatgacgtcgattttgctttgcagctcaggttcaataccgtcaaccgctggtgcagagttatccagcgcatgagcgatggcaaaacctaaacgcgcctgatcttcaaccggtgcgcggtaagtccacgccgcgatatcatccagacgggtgtcatcaacgttggtaacaaacagcggatgcttcgcacgttgaccgatgttgaggattgccgcaatctgccagtcagccactttctgtgctgccgccatttcgcgcgctttaccttttaccgcctggcgcaccgccagcgcaacgcgcgcgccggtctgggtaacgtcttcgcccagcaccagtaccgcatcgtaagattcgatttcgcgcagtgccggcgtataaatgccgccttcacgcagtactttcagcgccagttgcagacgttcctgctcaccgtgagcgataccggtatagaagttttcttcgcccaccagctcacgcagcgcaaagttgctttccacgctggcacgcggagaaccaataccgatgactttcttcgactgacgcagaatatctgctgcgccctgcattgcctgttcggcgttgagggtaatgaaatcatcgccacgacgctgtactggctgacgcggacgatctttcaggttgacgtaaccgtaaccgaaacgaccacggtcgcagaggaagtagtggtttaccgtaccgttgtaacggttttcgatacgacgcagttcgccataacgctcgccggggctgatgttacagccgatggaacattgctggcagatgctcggcgcaaactgcatatcccatttacggttgtaacgctcggagtgcgttttgtcggtgaatacgccggtcgggcaaatttcgaccaggttaccggaaaattcgctttccagcgtgccgtcttccgggcgaccgaagtagacgttgtcgtgcgcaccgtaaacgcccaggtccgtaccgtcagcgtaatctttgtagtaacgcacacagcggtagcaggcgatgcagcggttcatttcgtgagagatgaatggccccaaatcctgattacggtgggtacgtttagtgaaacggtagcgacggaagctgtgtccggtcatcacggtcatatcctgaagatggcagttaccgccttcttcacatactggacagtcgtgcgggtggttggtcattaaccactcgaccacactttcacggaactgtttcgcttcttcgtcgtcaatggaaataaaggtgccatcggaagccggtgtcatacaggacatcaccaggcgaccacgcgtgtcttccgcgttttggtattgcttcaccgcacactggcggcaagcaccgacgcttcccagcgccggatgccagcaaaagtaaggaatatcaaggcccagagacagacaagcttccagcaggttgtctgctccgttgacctcgtattctttgccgtctacatgaattgtagccattagcatgcttccagttttctcagtcagagactgagcgttaatcgaaattcggttaccagcgctctttcagcaggttcggctgaatcccattaatcaaatgggtattgctgaacggctgtttgattcccgcctcaaattcttcgcggaaatatttgatggcgctctgtaacggctccactgcaccaggtgcgtgggcacagaaagttttacccgggcctaagaatcgacacagttgctcaagtgtttcgatatcgcccggctggccttcgccacgctccagcgcacgcagaattttcacgctccacggcagaccgtcgcggcatggcgtacaccagccgcaggactcacgggcgaaaaactcttccaggttacgcaccagcgacaccatgttgatctcgtggtcaaccgccatcgccagcgccgtacccagacggcttcccgctttaccgatactttcgaattccatcggcaggtcaaggtgcgcttcggtcaggaagtcagtccccgcgccgcctggctgccaggctttgaatttcagaccgtcacgcataccaccggcgtagtcttcgaggatctcgcgtgcggtggtgccgaacggcagttcccacagacccggatttttcacccgaccggagaagcccatcagcttggtgccagcatctttacttttcgagatgttctgataccactccacgccgttagcgaggatcgccggaacgttacacagggtttcgacgttgttaacgcaggttggtttaccccatgcaccggaggttgccgggaagggcggtttcgagcgtgggttagcgcgacgcccttccagggagttgattaacgctgtttcttcaccgcagatgtagcgccctgccccggtatggacgaacagttcgaaatcgaaacctgttcccataatgtttttgccaagcagacccgcttcggtggcttcggcaatggcacgacgcagattcactgccgcttcgatatattcgccgcgcaggaagatatagccacggtaagctttcagcgcaaacgcggagatgagcatgccttccaccagcaggtgcggcagttgctccatcagcagacggtctttataggtgcccggctccatttcatcggcgttacacagtaggtaacggatattcatggattcgtctttcggcatcaggctccacttcaggccagtcgagaagcctgcgccaccgcgccctttcagaccagagtcttttacctgattaacgatttcgtccggagacaacccggtcagcgccttacgcgcgccttcgtaaccgtttttgctgcgatattcgtccagccacactggctgtttgtcatcgcgcagacgccaggtcagcggatgcgtttcgggagtacggataatgtttttcatttataccgctccagcagttcagggatcgcttccggggtcagatgcgcgtgagtgtcctcatcgatcatcatgtttggccctttatcacagttccccaggcagcaagttggcagcagcgtgaagcgaccgtcaaatgtcgtttgccctggtttgatgttcagttttttctccagcgccgcctgaataccctggtaaccgttgatgtgacagaccacgctgtcgcaataacggatcacatggcggcctactggctgacggaagatctggctataaaacgttgccacgccttcgacgtcgctcgccggaatacccagcacatcggcgatcgcgtggatcgcgccatccggcacccagccacgctgcttctgaacgattttcagcgcttcaatggacgccgcacgcgggtcttcgtagtggtgcatctcgtgctcaatcgcttcacgctctgccgcactcagctcaaaagcctcggtttgtggttgttgattctcgtgcataattagcggtccacatctgacataacaaaatcgatactgcccagataaacaatcaggtcagacaccaggctgccgcggatcgccgccggaatttgctgcaaatgcgcataactcggcgtacggatacgggtgcgataactcatggtgctgccgtcgctggtcaggtagtaactgttgatccccttggtcgcctcaaccatctggaaggattcattggcaggcatcaccggaccccacgacacttgcaggaagtgggtgatcagggtttcgatatgttgcagcgtgcgctctttcggcggcggcgtggtcagcgggtgatccgctttgaacgggccttccggcatgttgttgaggcactgctcaagaatacgcagactctggcgcaactcttctactttcagcattacgcgggtgtagcagtcagaaacaccaccgcccaccggaatttcgaagtcgaagttttcatagccagaataaggacgcgccttacgcacgtcgaagtcgatcccggtggcacgcaggcccgcgccggtggtgccccactccagcgcctctttcgcgccgtaagcggcaacgccctgggaacgacctttcagaatggtgttttgcagcgccgctttctcgtaagacgccagacgtttcggcatccagtcgaggaactcacgcagcaggcgatcccagccgcgcggcaggtcgtgcgctacgccgccaatacggaaccacgccgggtgcatacgaaaaccagtgattgcttccaccagatcgtaaattttctgacgatcggtaaaggcgaagaacactggcgtcatcgcgccgacgtcctgaataaaggtggagatatacagcaggtgactgttgatgcggaacagttcggagagcattacgcgaatgacgttaacgcgatccggcacggtgatcccagccagtttctctaccgccagcacataaggcatttcgttaacgcagccgccgaggtattcgatacggtcggtatacggaatgtagctgtgccaggactggcgttcgcccattttctctgcgccacggtggtggtaaccgatgtctggtacgcagtcgacaatctcttcgccatcaagctgcaaaacgatacggaaagcaccgtgcgcagacgggtggttcggaccgaggttgaggaacatgaagtcctcattttcggtgccgcgcttcatcccccactcttccggtttgaaggtcagggcttccatctccagatcctgtttggctttggtcagctcaaacggcgagaattcggtagcgcgcgccgggtaatctttacgcagcgggtgacctttccaggtttgcggcatcatgatgcggcgcaggttcgggtgaccgtcgaatgtaatgccaaatagatcccaggtttcacgctcataccagttagcgttcgggaataatttggtaaaggtcggtacgtgcaggtcgttttctgccagcgccaccttcagcatgatgtcgcggttacgatcgatagaaatcagatggtagaaaacggaaaaatccgcggcaggtaacccttcgcggtgtgtgcgcagacgttcgtccatgccgtgtaagtcaaacagcatgacgtaaggtttcggcagtttctttaagaaatcgcccacttccagtaattgttcacgcttgatccacacaacgggaaccccggtgcgagtcgcctgaacagtaaaggcatccggcccaaaacggttgcgcagttcgccaatcaccggatcatcaagatgatcgcgggtctgccaggcgggttcttgcgcggttaagtcggtcatattgttcaccattgcaaatggtccgtggtgactgtcggcgcagtaagcttcgcgaaatagatttaggaataagcgaagaaaattccctttgccgacaggcgcaaattaaatctcgtcaggtgtacgcaggttggttacggcaatgcgttcaccgcgcttgcgttcgcgctctgattgcatattggcgcgataaacgccctgatcgccaaccacccaggagagcggacgacgttctttaccgatagattcctgcaacagcatcagtgcctgcatgtacgcttcaggacgcggcgggcagcccgggatatacacatcaaccgggatgaatttatcgacgccctgcacaacggaataaatatcgtacataccgccggagttggcacaggcacccattgagataacccatttgggttccagcatctggtcatacagacgctgaataaccggtgccattttggtaaagcaggttcctgcaaccaccatcaggtcagcctgacgcggcgaagcacgcaatacttcagcgccaaaacgcgccacgtcatgcaccgcggtaaacgaagtcaccatctcaacgtaacagcaggaaagaccgaagttatacggccaaattgagtttttacgaccccagttaaccatgtcattgagcttgcccataaacacgtttttgttaacttcttgctccagagggtcggttacgatctcctgcttttgcagggggtaacggtcgttctcaccgttgggatctatgcgggtgagcgtataatccatcttaatgcctcgcggttagcgttgacgattagcgatactgttcgtttccgggttcatacgctcgcggcgtgaacgcgcgggcgtccagtccagcgcgccaatacgcaccagataaaccagacctgccagtaacacaaaaataaaaattgcagcttccacaaagcctacccagccgctttcgcggatagaggttgaccatgcgaacagatacagcgcttcaacgtcgaagataacgaagaacatggccaccagataaaacttggcggacaggcgtaagcgggcggagccgaccgagtcgataccggattcaaacggaacgttttttgacctcgcgcgtgcgcgaccgcctaaaaaccaaccgcctaccagcatcaggcaacacaggccaatggcaacgataagaaagatagcgaatgcccagtgatgagcgatgacttcagtggatgttgacatactcattgcttactcatcaaaagtagcgcctgattctctgctctttacggcagatggacgccacatcgattcatggggaggaataaaaaaaaccttacaataactgcagaaactattttatacagctaattgatgtggtcttttactcctttctataaccttttgtcaactttaacaaaggtttcttcacactgatttacacaatgacaacaacatttgcatttggcgccctttctccccagatcattgacgactccaggaaaattagatgttgttgaatcgtgtccgttgtgaagcaatggaaaaaatacgggtctattttgacaggaatttgtgtcgattcctccccccaaaagagagtattttcttgatctgtgacacgcttttgtcattctataacaaaaatgcagcaacaaattcacgtattttttaacattattgtagcaggagatttttttcaggtgattatttgtgcgtacggggcgtgaatctctggtgattgaaaaatgaacagttttgtacgttctgcacgatacgaggaaagctttttactaaaaaaaagccgctggggtttaaaataaacccagcggttcgtttttacactattgtctcaggaattatctatcgtccgtcgattactcgatatccctttcaatcaacaatgagtcatctccttccggagcagacattgggctgtattgccacggattatggtagctctccatcgcctgatagatcacctgggccagctcattattactggacgggtcatagcacagcaaatattcggtatcaggtagcggcggtaagccatctactccactcagcacacgcagttccggactcatcatctcgaccggccttgccgtcacgccaagaccggctttcactgccgcacgaacggccggaagcgtcgaggcgacataagccagtcgccagggaatatctgctttattaagcgtcgccagcaccatatcgcgaaacggacttggatcatccagcaacacaagagggatcggctcacctttttgcaatacgtattccgctgcgcagtaccagtgtgttggcgaggtacgcaggttcaatgccttaaaggtagaaggacgatgggtggttaccatcaaatccacttcctgggattccagcatttctgccatgtaggcattacgtttaacgcggacatccagcgctagtttcggataaaccgaactcacgcgatttaacaggaaaggtaagatcgtatcggcagattcatctgaagcaccgatagttaacacgccctgaagattactgaacattaatgatgagcaggcctcatcattaaaacgcaggattttcctggcgtaaccaagaagttgaatgccatgttcagttaacagtttgttgcgaccgtgacgagcgaacagttctttcccaacgagttgttccagacgctgcatttgctgacttacggcggactgagtacgacacacagcggcagctgcggcagcaaaagtgttcagatcggcaacagcaacaaatgttctcagcagatcgaggtcgaggtcgaggttaattatcggacgatttgcacttatcatatattatcacttactggcggctcatactgagctggttaatgctgtgcacacacaaacaagcaattccatttgtaatgtgcctccctggcagtttcatccggaacccggacgaaagtaaaaatgcatatgagttgcactaaaaaagtgactcacattgttccgttataatgcctgaagtagatcacagaatatatcttcagggatcgcatatctattaagttactcactcttttctatttatgacatgcgcgtgtttgtataaatgtaaatgtgagtccttgttccactctcgtacagcatcgctggtcatacgcgaacacgtacaaacagcaatggtgaggcggcatcaagagcagggatccgtcatttatgcaagcattttaccccaaaaaccttttatttataagggtcattgcgaattatctgatgcaaagttatgttatgttaggcaaagtaatcttctattattaataagcacaacaaaacctttttgaatattaaataataattaattagcatcatccccattcattaattccgcttaacaatagtttcacgccttgcccccattgtgacacctcggaaatcatcacgctgttaaactctccgtaatgcggaaatatcatcatcgcgattcagtagtgaattcttaaacgaggcattttcacacaattatcttacagataaaaaaaccacacttacaattaagaatcagaacaattcactacataacattacttattaagcatatgcgcctcattattttgccattattaagttattaacagcacaatcgagccttcccctctggcaaaatcttattctgcagaccttcaaaacaccgtcctgggggagtacattgttctaagctgacttccacggcagggagtggcgataacagcaaaaaaggtcaagattcatgtcccccattgaaaaatccagcaaattagagaatgtctgttatgacatccgtggtccggtgctgaaagaagcaaaacgcctggaagaagaaggtaacaaggtactgaaactgaacatcggcaaccctgccccgttcggttttgacgcgccagatgaaattctcgttgacgtgatacgcaacctgcctaccgctcaagggtattgcgattccaaaggtctttactccgcgcgtaaagccatcatgcagcactaccaggctcgtggcatgcgtgatgttaccgtggaagatatttacatcggcaatggtgtatcggagcttatcgttcaggcaatgcaggcattgctgaacagcggggacgaaatgttggttcctgcacctgattacccactatggaccgcagcggtttcgctctccagcggtaaagcggtgcattatctttgcgatgaatcctctgactggttcccggacctcgatgatattcgcgctaaaattacgcctcgtacgcgtgggatcgttattatcaacccaaataacccaaccggcgcggtatattccaaagagcttttaatggagattgtggagattgcacgtcagcataatctcattatcttcgccgatgaaatttatgacaaaattctctacgacgacgctgagcatcactccattgcgccgctggcacctgacctgctgaccattacctttaacggactgtcgaaaacgtaccgcgttgcaggcttccgtcaggggtggatggtgttgaacgggccgaaaaaacacgccaaaggttacatcgaaggtctggaaatgctggcttcaatgcgcctgtgtgctaacgttcctgcgcaacacgccattcagaccgcactgggtggttatcagagcatcagtgaatttattacccctggcggtcgtctttatgagcagcgtaaccgcgcgtgggaattgatcaacgatattccgggcgtttcctgcgtgaaacctcgtggtgcgctgtatatgttcccgaaaatcgacgccaaacgctttaacattcacgacgatcagaaaatggtgctggatttcctgttgcaggaaaaagtcttgttggtgcaagggacggcattcaactggccgtggccggatcacttccgcattgtcacgctaccgcgtgtcgatgatatcgagctgtctttgagcaagttcgcgcgtttcctttctggttatcatcagctgtaatcttaatttcactgccggagattgcatccggcagtgttatcccgccacaatgacctgatgatgtcatcatacgtaaggtcactatgaaacagagccatttttttgcccatctctcccgcctgaaactcattaaccgctggccgctaatgcgcaacgtgcggacggaaaatgtgtccgaacacagtttgcaggtagcgatggtcgcccatgcgctggcagctatcaaaaatcgtaaatttggcggtaatgtcaacgccgaacgtatcgctttactggcgatgtaccacgatgcttcagaagtgctcaccggagatctccctactccggtgaaatacttcaattcgcaaatcgctcaggaatacaaggctattgaaaaaatcgctcagcaaaaactggtcgatatggttccggaagagctgcaggatatctttgcgccgttaattgacgagcatgcatatagcgatgaagaaaaatcgctggtgaaacaggcagatgcactgtgtgcatatctgaaatgcctggaagaacttgcggccggaaataatgaattcttgctggcaaaaacgcgactggaagcgacgcttgaagcgcgccgcagccaggagatggactacttcatggaagtatttgttcccagcttccatctttcgctcgatgagattagccaggattcaccgctgtaagcagtcggagtctgcgtcgcatcaggcaataagcaccggatgcgacatcaggctcttgtcaaaacggaaacagcatcgggatcatcaccacacaaaccgccatcacgataatggtgaacggtacccccaacttaacaaagtcactgaagctgtaattccccggacctaaaaccagtgtgttaacaggtgaagatatcggtgtcataaaggcggcggatgctgccatcgccacgaccatcgcaaatggataaggcgacacccccatcgttttggcagcagccagcgcaatcggagccatcaacaccgccgtcgcggtattagaaataaatagcccaataaccgccgacaagacaaacaaacaacccagcatcatatgtggcccgtaaccgccgccaatgtccatcagccctttcaccgccagcgcgacacctcccgttttctgtaatgccacagcaaatggcatcatcccaacgatcaaaataatgctcggccagtgaatggatttataggcgctttcagcatctatacagcggaatttccccatcagcaggcaggcgataatagcggcaacaggattaggaatttcatcggtcagcattaacgccaccattagcaccagacagaaaatcgcatggggtgcctggctgtgcgcgggcgatgcttcactcacctcttccggtaagttcagcgctacgaagtcgcggccctgtttggccagcataccgatcagtttccagttacccacaaccaggatgatatcgcccagcagcagaggctcatccgccagcgaaccttccagcgccacgccattgcgctttagccccactacattcaatccgtagcgggtacgaaaaccaatttcgcgcaccgatttaccaataagttctgactcaggaattaatgaaatctctgccatgcccacatcaagagcctggtcagaaaaatactcgccgcgcagtaccatcggctccagcaattgctcactacaaaattgccggagatcgacatcagccgcagacatatcaataagcaaaacgtcacgcgcgcgaaattcagaaaccccattaacgttcacgataacgcgacgaaaacgccgccagcgttcaacaccgatgacgttagcaccataacgttcacgtaatttgagatcgtccagtcgttgaccaatcattggcgatccggggcgaatagccagacgtcgcgcacgcccggtcagtcgatattcacggataagatcgcgaaaggttcggcgcgtccagccttcgcgctgcggggtctgggtatcccctttcagcatgaaacgcatcactaacatatacaaaatacccagcaccagcacgaccaggccaataggtgttacgctaaagaaactaaaaccatgatagccttcacgcagcaattcactgttgactaccaggttcggcggcgtcgccaccagcgtcatcatgccgcttatcagcccggcaaaacttaacggcatcatcaggcgcgacggcgacgtttgcatacgcatggcaacgcttaacaccacgggaataaagatagcgacaacgccggttgaactcataaacgcgccaagccccgcgacggtcagcatcaacaaaaccaacattttgatttcactgttgcccgccactttgaccagccatgtccccattacagtggcaacaccggtacggaccaaaccatcgccaataataaacaaggcggcaatcaggacaacgttaggatcggaaaagccggaaaatacttcggggaccgtcagcgttccgcttaatgcaaacgcgacaataacaaacaaagcgaccgcatccatacgcactctgcccgtcgcaaacaagacgatggcaacggccagtaatgaaagaacccaaatcaattcaccgttcacaacttatccttgttaattgagggggataacttgattctgccataaaaaagccccgacgagacggggctaaatcatgatcaggtgtttcactgaataataacatcgccatttggctgtttggtcacagtaatttgctccagactgtggaggactaaatcgacttcattcaggcgcggggtatctgccggggcattaaccgcaataacatggcaacccgccgccagacctgaaagcacgccagcgggagcatcttccaccacaacacactcctgcggcgcaaggcccagcagctgcgcgcctaacagatacgcatcaggttctggttttccgcgcttcacccgctcagcggttacaaacacctctggcgcgggaagccccgctattttatgacgcgctcgcgctaccggcatggagccagaagtcacaatagcccacggaatacctgctttattcaaatgattgagtaaggcgattgcccccggaagcgcggtaataccttcggtttccgtggcctcgatgtgctccagacgcgtaaactcggcggcaatgtctgcctcggatttgcccgccataaaatggcgcagagaggtgatcgcctgtttaccgtgaatgaaagccagcacctcttccggcgataacccatgacgtctggcccagttgctccacgcccgttctaccgcaggcagggaatccaccagcgttccatcaagatcaaacagaaaacctttgcaccgcacgcgggcctcctcaggcgttaataatttgattaatttcgttggcgctcaaatggtactggcgcgggcaggcatgccagacattaagcatgcgctgatatttttcccacattggcgtctgggcgttaaaaccgtgagttccagcgtcaaaatgggtatagcgcccttccacattaaccataaagcggacataaccgaggtaacgtgcttcagtggcagcgtcaaagccgaggaaggtgacacgacgttcatcgatggattgctggtcctgcaaattagaccaggaaacatgcaacgcatgatacatctccataatgtcgatgatagtgcggcaggtttcttctttcagctcgccaaactcgcgatccagttcacgcatctgtaatccataaccacgctcaatgattgtttgcaggcgacggtaacgttcagcatttgccggatcgagcatagtcatcatcttgtactggttagacaaaataagacgttgcgcgttggtcatttccattattgactcctgtatcactctactacggtgaaaaaaagaaggctgagtatgccttcttttatatgcgtaatcaggggtcaattacaaatcatcaaggaaagttttatccagttgtttgaaggcacgcttaagcgtgtcagctaatgcctggtaatcaggcttgccttcaacgggtgccaacacctgtccagactcctgcaatttaccgcgaacttcataaaaccagttgaggattgcaggaggtaatggcgttacagaacgcttgcccagccaccacaatccctgcatgggtaaacttaaggcgaacagcgcagtggcaactgccggcccaagctgaccgcccagggcaatctgccagcagagagtaaatacggcgatcggcggcataaaacggatcgcataacgcgtcatcttgataacgcgattttcgacaaagactggggcaaggcgtttttccagcggccacgtctttgagtaatgctgtccccggcaaaacaagctaaaaaaattaacagaacgattatccggcgttgacatgcttcacctcaacttcacatataaagattcaaaaatttgtgcaaattcacaactcagcgggacaacgttcaaaacattttgtcttccatacccactatcaggtatcctttagcagcctgaaggcctaagtagtacatattcattgagtcgtcaaattcatatacattatgccattggctgaaaattacgcaaaatggcatagactcaagatatttcttccatcatgcaaaaaaaatttgcagtgcatgatgttaatcataaatgtcggtgtcatcatgcgctacgctctatggctccctgacgtttttttagccacgtatcaattataggtacttccatgtcgagtaagttagtactggttctgaactgcggtagttcttcactgaaatttgccatcatcgatgcagtaaatggtgaagagtacctttctggtttagccgaatgtttccacctgcccgaagcacgtatcaaatggaaaatggacggcaataaacaggaagcggctttaggtgcaggcgccgctcacagcgaagcgctcaactttatcgttaatactattctggcacaaaaaccagaactgtctgcgcagctgactgctatcggtcaccgtatcgtacacggcggcgaaaagtataccagctccgtagtgatcgatgagtctgttattcagggtatcaaagatgcagcttcttttgcaccgctgcacaacccggctcacctgatcggtatcgaagaagctctgaaatctttcccacagctgaaagacaaaaacgttgctgtatttgacaccgcgttccaccagactatgccggaagagtcttacctctacgccctgccgtacaacctgtacaaagagcacggcatccgtcgttacggcgcgcacggcaccagccacttctatgtaacccaggaagcggcaaaaatgctgaacaaaccggtagaagaactgaacatcatcacctgccacctgggcaacggtggttccgtttctgctatccgcaacggtaaatgcgttgacacctctatgggcctgaccccgctggaaggtctggtcatgggtacccgttctggtgatatcgatccggcgatcatcttccacctgcacgacaccctgggcatgagcgttgacgcaatcaacaaactgctaaccaaagagtctggcctgctgggtctgaccgaagtgaccagcgactgccgctatgttgaagacaactacgcgacgaaagaagacgcgaagcgcgcaatggacgtttactgccaccgcctggccaaatacatcggtgcctacactgcgctgatggatggtcgtctggacgctgttgtattcaccggtggtatcggtgaaaatgccgcgatggttcgtgaactgtctctgggcaaactgggcgtgctgggctttgaagttgatcatgaacgcaacctggctgcacgtttcggcaaatctggtttcatcaacaaagaaggtacccgtcctgcggtggttatcccaaccaacgaagaactggttatcgcgcaagacgcgagccgcctgactgcctgatttcacaccgccagctcagctggcggtgctgttttgtaacccgccaaatcggcggtaacgaaagaggataaaccgtgtcccgtattattatgctgatccctaccggaaccagcgtcggtctgaccagcgtcagccttggcgtgatccgtgcaatggaacgcaaaggcgttcgtctgagcgttttcaaacctatcgctcagccgcgtaccggtggcgatgcgcccgatcagactacgactatcgtgcgtgcgaactcttccaccacgacggccgctgaaccgctgaaaatgagctacgttgaaggtctgctttccagcaatcagaaagatgtgctgatggaagagatcatcgcgaactaccacgctaacaccaaagacgctgaagtcgttctggtggaaggtctggtcccgacacgtaagcaccagtttgcccagtctctgaactacgaaatcgccaaaacgctgaacgcagaaatcgtcttcgttatgtctcagggcactgatactccggaacagttgaaagagcgtatcgaactgactcgcaacagcttcggcggtgcaaaaaacaccaatattaccggcgttatcgttaacaaactgaacgctccggttgatgagcagggtcgtacccgtccggatctgtccgagatttttgacgactccaccaaagcaaaagtgaacaacgttgatccggcgaagctgcaagaatccagcccgctgccggttctcggcgctgtgccgtggagctttgacctgatcgcgactcgtgcgatcgatatggctcgccacctgaatgcgaccatcatcaacgaaggcgacatcaatactcgccgcgttaaatccgtcactttctgcgcacgcagcattccgcacatgctggagcacttccgtgccggttctctgctggtgacttccgcagaccgccctgacgtgctggttgccgcttgcctggctgccatgaacggcgtagaaatcggtgccctgctgctgactggcggctacgaaatggacgcgcgcatttctaaactgtgcgaacgtgctttcgctactggcctgccggtatttatggtgaacaccaacacctggcagacttctcttagcctgcagagcttcaacctggaagttccggttgacgatcatgagcgtatcgaaaaagttcaggaatacgtggctaactacatcaacgctgactggatcgattctctgactgccacttctgagcgcagccgtcgtctgtctccgccagcgttccgttatcagctgactgaacttgcgcgcaaagcgggcaaacgtatcgttctgccggaaggtgacgaaccgcgtaccgttaaagcagccgctatctgtgctgaacgtggtatcgcaacttgcgtactgctgggtaatccggcagagatcaaccgtgttgcagcctctcagggtgtagaactgggtgcaggcattgaaatcgttgatccagaagtggttcgcgaaaactatgttggtcgtctggtcgaactgcgtaagaacaaaggcatgaccgaaaccgttgcccgcgaacagctggaagacaacgtggttctcggtacgctgatgctggaacaagatgaagttgatggtctggtttccggtgctgttcacaccaccgcaaacaccatccgtccgccgctgcagctgatcaaaactgcaccgggcagctccctggtatcttccgtgttcttcatgctgttgccggaacaggtttacgtttacggtgactgtgcgatcaacccggatccgaccgcagaacagctggcagaaatcgcgattcagtccgctgattccgctgcggccttcggtatcgaaccgcgcgttgctatgctctcctactccaccggtacttctggtgctggtagcgacgtagaaaaagttcgcgaagcaactcgtctggcgcaggaaaaacgtcctgatctgatgatcgacggtccgctgcagtacgacgctgcggtaatggctgacgttgcgaaatccaaagcaccgaactctccggttgcaggtcgcgctaccgtgttcatcttcccggatctgaacaccggtaacaccacctacaaagcggtacagcgttctgctgacctgatctctatcggaccgatgctgcagggtatgcgcaagccggttaacgacctgtcccgtggcgcactggttgatgatatcgtctacaccatcgcgctgactgcgattcagtctgcacagcagcagtaatctcgtcatcatccgcagctttgcgctgcggatatctgaaccggaaatagtcactatttccggttttttattctcttaatttgcattaatcctttctgattatcttgcttaactgcgctgcatcaatgaattgcgccatctcactttgcatacttaccactttgttttgtgcaagggaatatttgcgctatgtccgcaatcactgaatctaaaccaacaagaagatgggcaatgcccgatacgttggtgattatcttttttgttgccattttaaccagccttgccacctgggtagttccggtgggcatgtttgacagtcaggaagtgcagtatcaggttgatggtcaaacaaaaacacgcaaagtcgtagatccacactcatttcgcattctgactaatgaagcaggcgaacctgagtatcaccgcgtacagctgttcacgacgggcgatgaacgcccgggtctgatgaacttcccgtttgaagggttaacctcaggatcgaaatacgggacagccgttggcatcatcatgtttatgctggtgattggcggcgcgtttggcattgtgatgcgtacaggaaccattgataacggtatcctggcgcttattcgccatacccgcggaaatgaaattctctttattcctgcgctgtttattctgttttcacttggcggcgcaatatttggtatgggagaagaggccgtcgcctttgccattatcatcgcaccgctaatggtccggctgggctatgacagtattaccaccgtccttgtgacctatattgccacgcaaatcggttttgccagttcgtggatgaacccgttttgtgtggttgttgctcagggtattgccggcgttccggtgctttctggctccgggttgcgcatcgtggtgtgggttatcgccactctgattggcctgatctttaccatggtgtacgcctcacgagtgaaaaagaatcctcttctgtcacgcgtgcatgagtccgaccgcttctttcgtgaaaagcaggcggatgttgaacaacgtccgtttacctttggtgactggctggtattgattgtcctgaccgccgtaatggtctgggttatttggggcgtgatcgttaatgcctggtttattcctgaaattgccagccagttcttcaccatgggtctggtgattggcatcatcggcgttgttttccgccttaacggcatgacggttaataccatggcttcatccttcaccgaaggggcgcgaatgatgatcgcccctgccctgctggtaggtttcgccaaagggattttgctgctggtcggtaatggtgaagcgggtgatgccagcgtgttaaataccatcctcaacagcattgccaatgccattagcggtctggataacgcggtcgcggcctggtttatgttgctcttccaggcggtatttaatttcttcgtgacgtccggttctggtcaggcggcgttaaccatgccgttactggcaccgcttggcgatctggtcggtgttaaccgtcaggttaccgtgctggcgttccagtttggtgatggcttcagccacatcatttacccaacctcagcttcgttaatggcgacgctcggtgtttgccgggtggacttccgtaactggctgaaggtgggtgcgaccctgcttggactgctgtttattatgtccagcgtcgtggtgatcggcgctcagttgatgggctaccactaaaaatgttaagagccgcaattgcggctcttttttcattctgccgtttcagtctctacggcttcatttttggcattgcgcttcatccacaacgccagcgctttcagcgagtctggagtgaactcatcgcagcgtgcggtgatttcttccggcgtcagccagcaaacttcactgacttcatcttcctgtagagcgaagggaccgtgagagacgcagctgaacaacgcgccccagacacggcaatttttatcttcgaaatagaactgcccgtgctcagcaaaggggaccccggcaatgcccaactcttcttccgcttcgcgacgcgcggattccagcagttgctcatcggcctggactacaccgcctgcggtcgcatctaacatgccgggtaaaaagtcttttgtctcggtacgacgctggaccagaattttgcccatgccatcatgcacgacgatataagttgcacgatgacgcagacactgtgcccgcatttgttcccggctggcttgtgcaatgacttcgttctcttcattgacaatatccacccattcagtacttgccaaacgacgctgttccattatcaggaaaccttctttttctggcgctcttacggcgcattttgagttgtgggtaaattacggattaatcgcgacctgcgcaatgatactttgatcattgagtgcgattacactaagtacgtcattatccagcatgccataactcgccggattaccgcctttcggaatactcaccgagccggggttgaagtggaaaatctccccccgctgttctgccactggcagatgggtatgaccgtacaccagcacatcgttctggtttaaagcaggtagattttccgggccaaaaagatgaccatgcgtcaaaaacagacgttgtttttccagtaatacctgttgccacggcgcggttatcgggaaatgcagcagcatttgatccacttcgctgtcgcagttgccgcgcacagcgataaccttatgtgccacttcattaagccgttcagcgactttggctggcgcgtaaccctccggtaaagcattacgcgggccatgattcaacacgtcgccaaggatcaccagccactgggcaccgctttgggcaaacaactccagaacacgttccgtcgccggtaacgacccatgaatgtccgatgcaaacatcagtttcatcactcactcctcgtcgaaaaaacgtaagctatgatactggattctgtcgttgctatcagccagattgcttcgccgaaagtgcaataaaacgctggacagacgctcgctgccactggaatgtcgcataatccaccaggcgttccggcacctcatcgccatgtagtaccaggcggttaatcattagcgccagatcagtatcagcaatgcaccattcaccaaataaattcggctgacccagtgctaacaaatgttctgccatcgcgaacaatttctctgcactggcttttccctcggccgttagtggcgcttttttcgcccccgcaaagacaacatccgtcgggcgttcttcgcggatgggcatcagatcgctgcgcaaccaagcctgaatctgtcgtgcacgcgcacgattttctaaatcaagcggataaatacgttcccaggtcggtggcgcaaatcgatcttccagatactccgcaatggcagaagattcactcaactcaaaatcatcgatctgtaataacggcacacggcgtgtctgaccgtaaccttgccacgccggctgcaaatgttcaccgctgtcgaggtcgatggtcttgatatgaaacgacaggcctttctcctgcaacgccacccaggcggataacacataaggggagaaaaaatgggcatctgaccaaagcgtgatagcgggtttactcattatgtcctcggcaataaagggggcttgctatcaaactatagagcctttttgtcactgtcacgtgacgaatactcacgcaagtcgccgcgctttctatacttgtggtgttcagatgattagacaaccggagctgcaatgatcgatctctatttcgccccgacacccaatggtcacaaaattacgctgtttctcgaagaagcagggctggattatcgcttaataaaggtagacctggggaaaggaggtcagtttcgcccggaatttttgcgcatttcgcctaacaacaaaattccggcaattgttgatcattctccagccgatggcggcgaaccgctaagcctctttgagtctggtgccattttgttgtatctggctgagaaaacgggactcttcttgagtcatgaaacgcgtgaacgcgccgtcacattacagtggttattctggcaggtaggcggactggggccgatgcttgggcaaaatcatcattttaatcacgcaaccccccaaaccattccttacgctattgaacgttatcaggttgaaactcagcgtctgtaccatgtactgaacaagcggctggaaaattcgccctggctgggaggcgagaactacagcattgcggatattgcctgctggccgtgggttaatgcctggactcgccagcgaattgacctcgcaatgtatccggcagtcaagaactggcatgagcggatccgttcgcgccctgccaccgggcaggcactgctaaaagcacaacacggtgatgagcgttcggatagttaacagaaacaggttctcgtgtattatttcatcctaagtaaaacaacggagaacctgcaatggcacaacctgccgctattattcgtataaagaaccttcgtttgcgtacgtttatcggaattaaggaagaagaaattaacaaccgtcaggatattgttatcaatgtgactatccactaccccgccgataaagcgcgcactagcgaagatatcaacgatgcgctgaattatcgcaccgtaacgaaaaacattattcagcatgtagagaataaccgtttctctttgctggaaaaattaactcaggatgtgctcgatatcgcacgtgaacatcactgggtgacgtatgctgaagtggagatcgataaactgcacgcgctgcgctacgccgattcggtatccatgaccttaagctggcagcgttaaccgccatatcgggaggctgcatgaacatagtgatcaccggagggacgggattaattggtcgccatttgattccacgtttgctggagctgggccatcaaatcacggtaatgacgcgtaacccgcagaaagccagttctgttctcggccctcgggtgacactatggcaagggcttgccgatcaaagtaacctcaacggcgttgatgcggtaatcaacctggccggagagccgattgctgataaacgctggactcacgagcaaaaagagcgtctctgccaaagccgctggaatatcacgcaaaaactggtcgatttgattaatgccagcgacacgccgccgtcggtactcatttccggctcggcaacgggctattatggcgacttaggtgaagtggtggttaccgaagaggaaccgccgcataacgaatttacccataaactctgcgcccgctgggaagaaattgcctgccgggcacaaagtgacaaaacgcgagtgtgcctgctgcgtaccggcgtagtgctggcaccggatggcggtattctcggtaaaatgctgccgccatttcgttttggcctgggcgggccgattggctctggtcggcagtatctggcctggattcatattgatgatatggtcaacggtattctctggctgctggataaagagctgcgcgggccatttaatatggtttcgccctacccggtgcgcaatgaacaatttgcccatgcactgggtcatgcgctgcatcgcccggccattttgcgcgtccctgcgaccgccattcggttgttaatgggcgaatcttcagttctggtattaggcggtcaacgcacgctgccaaaaaagctggaagaagcgggttttgcgtttcgctggtacgatttagaagaggcgctggcggatgtcgttcgctgatgtggtttactgcaaacatccaccagcggaaacgctgatgaataaatatagataattcagaactatttttagcggactgcaacttttacatttcagcggaagcggactcgcaaattccccatgaaatactccggcagcgttaaccaccggagaggaaattatttcagcgaacctttaaggaactgttgcagacgagggctttgcgggttaccgaataactgctccggcgccccttcttcttctattttcccctgatggaggaaaatgacgtgagtagaaacatgacgagcaaagcccatttcgtgagtcactaccaccatggttttcccctcttctgccagttgctgcataatacgcaacacttcgcctaccagttcaggatcgagcgctgaagtaggttcatcaaacagtaaaacttccggttccatcgctagcgcccgcgcgatagaaacacgctgttgctgaccaccggacaggtgtaccgggtatttcccctgcgcacgttcgtctatcccgacttttgccagatatttcaccgcccgctcgcgcgcttcctgcttgctcaggcccaacacctgaatcggcgcttccatgacgttttccagcaccgtcatatggctccagagattgaagtgctggaataccatcgtcaggcgtgtgcgcaataagcgcagctgatttttatcggcgactttgagttgaccgtctttatcgcgcaccagattgatcgtctggccattgaccacgatcgatccttcgctcggtttttcgaggaagttaatgcagcgcagaaaggtacttttacccgatcccgacgatccgatgatgcttatgacatctccggcattcgcttgcaatgagacccctttcagcacttcgtgttcgccgtagcgtttgtgcaaatcgataacgtttaatttattctcggacatcgtattctcagtgcgttgaagaaggtttcacatgctgcaaccagcgtttttcagctctacgaaagaggctgatcaggacataagagatgattaaatagagcaccgcggcaatgccgaaagcggtaaaaggttgatatgtggcggcgttaatatcgcgggcaattttcagcagatccggcaccgtggcagtaaatgccagcgcagtagagtgcagcatcaggatcacttcgttgctgtacgccggtaacgcaatacgcagcgcagaaggcaaaataatgcagcgatacattttaaaggtcgagaagccataggctctggcggcttcaatttccccatgcggcactgaacggattgccccggcaaaaatctcggtagtgtaagcgcaggtgttaagcgtcagcgccagcacggtacagttcagaccactgcgaaaaaaggcgttaaggaactcggttcccttaacaatctccagcgtgtacatgccggaatagaacaccagcaactgaacatacagcggcgtaccgcgaaaaatataggtaaataaccagattggaaactggatgtatttattacttgagacgcgaccaatcgccagaaacagcgccagaactccgcctatcactaccgacaaaatcagcagccacagggtgatcgccacgccagtaaagcgataaccgtcagtccacagcagtggtttccagtattcatgtaagatttcgatcacaggtcagccctcttcacacccacggagtagcggcgctcaaggaacagcagcacaccattggaaacggtggtgaaaacaagataaatcacgccacagacgatagcgaaatagaacggttcccaggtacttttgcctgccagttgcgtggctttgaccacatcttccaggccgagtaacgaaaccagtgcggtagatttgaggatcacctgccagttgttgccaatgcctggcagggcgtaacgcatcatcgccggaaacatgatccgccgaaacacttgcccacgagtaaaaccgaacgccgtcgccgcctctatatgtcctttcggcactgccataaacgcgccacgaaacgtttcggtaaaataagcaccgtagataaaaccgagagtgataatacctgcgaccatcggatcaatatcaatctgcccgacgcccatcgcctccgtcaccgtgtttagcgcaatctgcaaaccgtagaaaatcagcagcatcaatactaaatccggcacgcctcgaatcagcgtggtgtacccttcgaaaataaggcccgaaagccgattttgtgagagcttaccgccagcgccaattaaaccgatgattacagcgagcactacagagctgatagccagctccagcgtgacgagcgcaccctgtaaaataacacctgaaaacccatacaacatgctgcctgtcctgtcgtgtgtggtgaattaccgcctcttgtctccctccggatacccgaagggagcgggctttctttcaccgatggcgattaaccaccataaacatcaaaatcgaagtactttttcgctaatttctcgtaagtaccgtcagcgcgcatttcggcaaaggctttgttcagtgcctcgcgcagttcgttatcttctttacgcaggcccatgccggtccctacgccaaacagtttttcatctttaacagacgggccaccgaatttgtaatctttaccgacgggttgtttgaggaaaccttcgctggctgcgacctcatcctggaacgcggcatcaatacgtccggcagtcaggtcagaataaatattgtcctgcccctgataagaaacgatttcaatgccttttggtgcccagtgttcgttaccgaacgtctcctgggtggtgccctgcaatacgcctacccgtttgcctttcagcgattcgactgtcggctgaatgtcggaatttttcgccaccaccagacgagaatcggcagcgtacagtttgtcggtgaaggctatttcttgctgacgtttttccgtaatggaaagcgatgacatgatggcgtcaatcttcttcgcttttaaggacgggattaacgcatccagtgggttttcgacaaacgtacattgcgtattgatgcgtttgcacaactccttcgccagatcgatatcgaagccaaccagttcaccttgtgaattttttgattcaaatggcgcataggtcggatcggtaccgatgcggatgttttgcggaatcgcagcaaatgccgcagttgcgctggagaaggccagaaccagagagagcgatagcaccagttttttcataatgtcctcaactgacagtctttttatcgggaatatttacaggtttgttacacttatcgtgccataaaattgaccatcaaggcaaaatatcccgccccgctagacgtattatttttcattaaaaatgcttaagtatgcatttcaatgcaccacgatagtgcaacaaacctggcgtgcaccatgatgatcattccatcaggtacagcttccctgcgacgtatcagtcaccgtagacattaaagtcgaaatactttttcgccatcttgtcgtaggtaccgtcctgacgcagctcgccaagcgccttattaaacgcagccgtcagttcagcatcatctttacgcagccctacaccggtgccgtcaccgaagtattttttgtctttcactgatgggcctgcaaaggcgaaatctttaccggcgggttgcttaaggaaaccttcgctggcagcaacttcatcttgtaacgcagcatccagacgtcctgcagccagatcggaatagactaaatcctggttggcataggccaccacatccacgcctttgctacgccaggtctcgttagcgtatgcttcctgggttgatccctgcagcacaccaacatgtttacctttcagtgaatccagcgttggctgaatcggtgaacctttggcggcaatcaaacgagaatctgcggcgtacaacttgtcggagaaagcaatctcctgctgacgtttatcggtaatggagagcgacgaaataatggcgtcgatttttttcgctttcagtgaggggatcagcgcgtcaaagtcgctggcaacctaggtacatttcacctgcatccgtttgcacatctcgttaccgagatcgatatcaaagccaacaaaatcacctttagcatctttcgacgagaacggcgcataggtggtatcggttccgatacgtaccgtctccggtagcgccgcatagctggaagccgctgcggagagaccgactaacaaagacagagcgagaatcgacttcttcatacataaccctcaagtgaaaatggcttttttatgttgtgtattgtgttgtgtgtttgcaggctctttcatgcaggtcttatgccatcttgacgacagcagtaacattcaacgttaaatatgttaataagacgttgcattattgtcctaaagttgaagatagcaggtatagcggttgaatcgcagcgtttcgattgaatggcagaaacaaaatgtcgaggatttgatcgcggttgcaaaattgccctgaaacagggcaacagcggagttatgcgccctgccagcgggcaaagagatcttcaggaagggttaccgcaaactggtcaagaacacgattaaccgtctgatttatcgcatcatcaagggattgtgggcgatgataaaacgccggaacgggaggcataatcaccgcaccgatttctgccgcctgagtcattaaacgcagatggcctaagtgcagtggcgtttcacgcacgcagagcaccaacgggcgacgttctttcagcaccacatctgccgcacgggtcagtaagccatcagtatagctatggacaatgccggacagggttttgattgaacagggtaaaatcaccatccccaacgtctggaaagaaccggaagaaatgctggcagcaatatcgcgcgcatcgtgtgtcacatcagctaacgcctgcacttcgcgcagggaaaaatccgtttcgagggataaggtctggcgcgccgcctggctcattaccagatgcgtttcgatatctgtgacatcgcgcagaacctgtaataaacgcacgccataaatcgcgccgctggcaccgctgatgcctacaatgagtcgtttcataaatagttgccctgtcagacttgcaggcagactttgcaggatttcggcgggagttgcaagtcagggtgccagaccggcaccctgagtgaaggcatcatccttcgttatgcatttcgagattttccacttcgttctgacgttgcactgctttggcgtcgtcattacgtaaagtatcaaggaaatcgaggtagccctgatcaacgtctttggtgacgtagacgccgttgaacaccgagcattcaaactgctggatatccgggttttcagcgcgaacggcttcgatcagatcgttcagatcctggaaaatcaacccgtcagcaccgatgatctggcgaatttcatctacttcgcgaccgtgagcgatcagttccgtggcgctcggcatatcgataccgtaaacgttcgggaagcgaatttccggtgccgcagaagcgaggtacactttcttcgctccggcttcgcgtgccatctcgataatctgctcagaagtggtgccacggacgatagagtcgtcgaccagcaggacgtttttatcgcggaactcggcgcggttggcgttcagtttacggcgcacggacttacgacgcagctgctgacccggcatgatgaaggtgcggccaacataacggtttttaacgaagccctggcggtacggtttgcccagaatacgcgcaatttccagcgcgatatcacacgaggtttccggaatagggatcaccacgtcgatatccagatcttcccattcgcgggcaattttttcgcccagtttggtgcccatattcacgcgcgcgctgtaaacggaaattttgtcgatgaacgagtccgggcgggcaaagtatacatactcaaacaggcacggattgctgaccggattgtcagcacattgacgggtaaacaactgtccttcttcagtgatgtaaatcgcttcgcccggcgcgacgtcacgcaggaaatcaaagcccagcgtatcgagcgcaacgctttcggaagcgaccatatattctgtgcggttctcgtcaatatcacgttttcccagtaccagcggacgaatcccgttaggatcgcggaaagcaaccataccgtggccgatgatcatcgccacacaggcatacgcgccgcggattaagcggtttgtagcagcgatggcggcgaaaatgttgtcggcttccagcgggtaatggcggaagttgtccagttcgcttgcgaaaatattgagcagaatttccgagtcggaagtggtgttgatgtggcggcgtttttcttcaaacagttttttacgcaactcgtgagcgttggtcagattgccgttgtgggcaagcgtaatgccatacggagagttaacgtaaaacggctgcgcttcagaggcgctggagctgccagccgtggggtaacgcacatgaccaatgcccatattgccctgcaaacgctgcatatggcgagcttcaaatacatcgctcaccagcccgttcgctttacgcaaacggaagcagttattggcatctatggtgatgatgccggcggcatcctgaccgcgatgctgaagcaccgttaaggcatcataaatcgactggttaaccggcataacaccggcgataccgacaataccgcacatacgtctttttcctcgttaagccacatctcagagcacttacgctctgggcaagaaacttgacgagctttgcagataatcaaaaaaccatctgatgataaaactgaactgcgggatcagctgtgatttgctccagtcttcgcttttcgacaccccggtaaaggagtcgagaaagaagagaatggcggcaacaatcaacacaccgcgcaacgcaccgaaacagacgcccagcacccgatcggtgcctgacaaccccgttttctctaccaactggcctatcacgaagttcacgatagcaccaacgatcagggtagcgataaacagtaccgcgatggcaatcccatttcgaaccagttcgtcttcaaagcccgtaaaccagactgacaggtaagtgtagtaatgactggcaacaaagaaagcacaaccccatgtcaccagcgataacgcttcacgaacaaagccgcggatcaggctaaccagagaggaaaaagcaatcaccgcgattatggcgtaatcaatccagaccatatgtgtcccacgattttacgccctgtcatcctgttcggggcgcattctaacagaaaaagaaaacgtttgcgtagggatttccttcccgcgcatcaataaaaatggcgctgaaaaaatattcaacgccatcgactttttatgcctttgcggcatcgggcaatgcgtgtcggatgccgcatgaacgccttatccgacctacagttctgctccagcacaggcctgataagacgcgctggcgtcacatcaggcaacggctgtcggatgcagcgtgaacgccttatccgacctacggttctactcctgcgtaggcctgataagacgcgctagcgtcgcatcaggcaacggctgtcggatgcagcgtgaacgccttatccgacctactgttctacccctgcgtaggcctgataagacgcgctggcgtcgcatcaggcaacggctgtcggatgcggcgtgaacgccttatccgacctacggctctacccctgcacaggcctgataagatgcgccagcgtcgcatcaggcaagaccgtattaattcggtgtatagcccattaccacgccacttaagccagaaagctgcttgagctcacccagcgatcctttcagcttctctttggaagcatccggcccaaccagaatacgggtaattttaccctgcactggcgtggatggcgacgtataaacccgataaccggcaccgcgcaacttaccgacaatctcattcactttatcggcatttttcagcgcgcccagttgcacaacataagctttacccgttggcgctgctttttcttccacaaccggcttcggttctggcttcggcgcaggtggtgcttcaacctttggcttaagcggctccaccggtttcggcttcggtggggcgaccggtgcaggttccggttcaaactcggtgttattggctgcaatagtggccggatcgagcgacggtgctgcggcatcacctgcccgtacctcttccgctgcgccttccggcggctgcgtcggcaacgcctgggtggcggctggcatcatatcaggctcatcgcgatcgcccgctttcggcaccagcgggatagcagcgaactcatcctgataatgctttttctgcccgtccagcagccctggaagtacaatcacccccagcgccaccagcacgatcgtacccactaaccgattctgaaacttacttgccaccgcttctcctcgcgtcaatcacttccatgacatgtgcgaccgtgtggaacgaaccacacaccagcacggtgtcttccgctttagcgtccgccattgcggcatcccatgcctgcgcaacgctatcaaatgatttgccgttacccaaatgctcaagcagttgttctgccgtggcaccgcgcggcccttccagtggcgcacaataccagtcatcaaccacgcttttcaaccaggccagagttccggcaatatctttatcatgtagcataccgataaccgccagcacgcgcccgtttttcggtagcgctttcatacgcccggtgagatattccgccgcatgtggattatgcgcgacatcaaaaataacgcgtggcgactcgctcacaatctggaaacgtcccggcaaaattgcgctggcaatcccgtcgcgaatggcattttcactgacctccagcccgctggcacgcagtgccgccagcgccgttgcggcattcggttgcgggacaagcggcaacggcagattttccagcgtgccgtgagcatcgctaaacgtccagtcatgatcggtgacggaatagttccactcaacgccccgacgttgtagcagtgcacctttttcctgcgccacatcagcaatggtagaaggcatttccggctcaccgacaattgccggtttttcgctgcgaaagatacctgctttctcgcgaccaatactttcgcgatctggccccagccagtcggtatgatccagcgcaatactggttactaccgcgacatcggcatcgacaatattggttgcgtccagacgaccgcccagccctacttccagaatcactacgtcaagttgtgcctgcttgaacagccacaacgccgagagcgtaccgtactcgaaataggtcagggaaatatcaccgcgtgccgattcaatctccgcaaaagaagcggtgtgggccgattccggcaattcctgaccctgcacacgtacgcgctcggtataacgcaccagatgcggcgaactgtagacgcccactttgtaccctgccgccatcagaatcgactccagcgtacggcaggtggtgcccttgccattcgtacccgcaacggtaaacacaaatggcgctggtttcagaatgccaagacgcgccgcgacctggctcacgcgctcaaggccgagatcgatagttttactgtgcaggttttccagataagaaagccacgaagccagaggcgacgcggcttgaggagtgcgtttgataatcatggtatccgctgattcgttacggtgagaatagcaaaagggcagagccagtggccctgcccttatcagttatcaggcctcaggttcctgatccggtaccggtggcaccactacgccttcacgcggcgcttcaggattcggcgctggcagattcatcaacttcgccagaatgctcgccagtttcaggcgcatttccggacgacggacgatcatgtcgatcgcgcccttctcgatcaggaattcactgcgctggaatcctggcggcagtttttcgcgaacggtctgttcgataactcgcggaccggcaaagccaattaacgctttcggttcagcgatgttgagatcgcccagcatggcgaaacttgcagaaacaccgcccatggtcgggtcggtcagcacggagatgtacggcaagccgcgctcctgcatttttgccagtgccgcagaggttttcgccatctgcatcagcgacatcagtgcttcctgcatacgtgcgccaccagaggcggagaagcagatcagtgggcagttatcttccagcgcctgctcaacggcacgcacgaaacgcgcacctaccacagaccccatggaaccgcccataaaggcgaactcgaatgccgcagcgacaaccggcattccatacagagtgcctttcatcaccaccagcgcatctttttcgccggtttctttctgcgcagatgccagacggtctttatacttcttggagtcacgaaacttcagcacatctttcggctcaagctcgctacccagctccacaaggcttccttcatctaacaggctatgcaggcgattacgcgctgtcatacgcatgtgatggtcacacttcggacagacctcaagattacgttccagctcagcgcggtataaaacctgaccgcagctatcacacttagtccacaccccttcaggaatgctcgccttgcgggtgggagtaatgttgcttttaattcgttcaatccagctcattagggacctttctgtctgaacctggttcgatgccagttttatctttggggacgcataatgccatttttgcccccaacagaccatgaatgttgcacattaaaacataacagcccgaaactttggataaaaaagtggtcgaaccgcagagttactttttattttgcggcgcgtgccgcagcgcgtttgtggcgaataaattcgaaaacacctggcaatattgaaacaaaaataatgccaacaatcatcagtttaaggttgctctgaatgaaggggagcgtgccgaagaaatagcctgcgtaggtaaaaagcagtacccacaacagtgcgccaatcacgttataagcggcgaaatgacggtacgacatgtggcccattcccgcaacaaacggggcgaacgttctgacgatcggcacaaaacgggcgagaataatcgttttgccgccatgtttctcataaaactgatgggttttgtcgagataactgcgacggaaaattttcgaattgggattactgaataacttttcaccgaacaaccgcccgatagtgtaattgaccgcgtcacccacaatcgcggcgatcagcatcagcaccaccatcatatggacgttgagatcgttggtctccagtgatgccaacgctccggcaacaaacagcaatgaatcacccggtaaaaacggcgttaccaccagaccggtttcacagaacaaaattaagaacaaaatggcataaacccagacgccgtactccgcgaccagctctgccagatgcacgtcaatgtgcaggataaaatcgatgaggaaataaatcaggtccatatttgcctatgccttgtactcgtcatctatcaggctgtaactacgttggctacagcctgaaatgttccgagcattattctcgttagtccgccagaaatagcgggcccattggcggttttggaagatcatatcggtcagggtaatccaccgcgaccagatatagcccttccgcttttgccgttgctgccgccagcgttctgtcctttgccgccagcaactctgctatccagctctccggctggttgtgggcaccgacttccatcaggctgccgacaatattcctgaccatatgatgtacaaaggcattcgctttgatatctaccaccacataaggaccgtgacgcgtgacattaatatgcataacgttgcgccacggggtccgggactggcactgcaccgcacggaacgaggtgaaatcattctcgcccagcaagcattgcgcagcccgatgcatccgttcagcgtccagcggttcgtaaaaatgggttacccctttactcaataccgccgggcgcagccgatgattgtagatgatgtagcgataacggcgagccgtggcgctaaatcgggcatgaaaatcatcaggtacagctttaacccaacgcacggcgatgtcaccaggtaaattcgcatttacgcccaacgtccacgcagcgtctttgcgctgcgcggtcgtttcgaaatgcacaacctgcccggtgccgtgtacccctgcgtcagtacgcccggcgcagaagacggtgatcggttcgttcgccacctgggagagcgccttttccagcttctcctgcacactgcggacttcgttctgccgttgccagccgtaatacttactgccgtcgtactcaatgcccagcgcaattttataaactggcggttgttgctggtcggacattagtacagatactcctgcaccagtttctcggcgatttttactgccatcagcgcgccgccaaagcgaacgttatcggccaccgaccagaactgaacttgctccggcataccgtagtcattacgtatgcagccaacggaaagatgcggcgtaccagaagcatctcctacctgagtcgggaattcgttctcttcagagagcacaatatcttcgccctgagcaaacgcatcacgcgcttcttctgccgccagcggacgcagtgcttcaaagttgaccatctgggcatgaccgtagaataccggtgcctggacgacgcttgccgaaatcatcagcccttcgtcctgcaggattttgcgtacttcgtcaacgatacgacgttcttcacgcacgctaccttcgctatccggcagtaacggcagcatgttgaacgccagctgacgcccgaagaaatcttcttcgtcaatcggaatgccattgagtaatttagcactctgccccgctaacgcatcgaccgcttttttgccctgggcggaggctgaaatcaggctggtaacgctgatacgtgataaaccgccctgatcaattagcggtttcagtgccgccagcagctggctggtcagactgtctggtacggcgatgacattccggttgcggtaatcggtcagtacaaacgggtttacttccggcaccaccagcggtacgtcgggttcgagagcaaacaatccgctgctgtcgatcaccagacaacctgagttggttgcttcttcaacccaggtagcggtagcttctttgcctgcgacaaaaaacgccagctgcgcctgcgtccagtcgaattcagcggcatcctgcacggtgattgtcttaccaccaaagcgcagttgttcgcctgcgctttcgttacgtgccagtgcataaatttccccaaccgggaactgacgttcagccagcgtttcaagcagggcttcgcccacagcgccagttgcgcccaggacggcaatgttccagccttcagacatggtggtttactccagaaatagcaaagctccctgccaatgttacagcagagagcatgaagaagagattaacgtgccggatgatgaacggcgttaaaacccagtttacacagcaatgatgccgcactggcgtcatcacaaatcacatacagagatgaccattcacggcgctcaagatagtttttgcgcagtttatcgaactcacccggtatcccggcgactttacgcagcggtgcgtcatcgcggcgcacatcatacaccaaatgcaccagccttttcagcgtcggttgatcgagcgggccatgcagcgtaatgcgaccaaactctggcgcgggcagtaatgtatccagcgcaacgtgctgttcatgcccaataaacttgctataagcttcaaacacttgcgtagtaccgcgtgctttaccttccagggtatagcctgcgatatgcggcgtgccgatatccacttttttcagcaattccacgttaagttccggttcgccttcccagacatccagcactacgcttaacttctggccttcgttcaggcaggtcagcagggcggtattatcgacgactgcgccacggcaggcgttaatcaggatcgctcccggtttcaggctgcggatcagtttttcatccgccagatgcagcgttttgtacggaccatctttaaagagtggcgtatggaaagtcagaatatccgcatgctggactaattcatccagcgagcggaaatccccctcatccccacggtcggcgcggggcggatcgcaaagtaaggttttgatccctaaagcttccagtcgcgcctgtaaacgacgaccaacgttaccaacgccaacgatccccacggtacgctcgtgcagtgaaaatccatcgcgttcggcaagcatcagcagggaggagaaaacatattccactaccgcaatcgcattacagccaggtgcagcggaaaaaccaattcccgcctgctttaaccatgcttcatcgacatggtcggtccccgcggtggcagtgccaacaaatttaatgggttttcctgccagcaaagattcattcactttcgtgaccgaacgcaccataagcgcatccgcgtctgccagttgagcgacgggaattggacgcccgggaaccgcggtcacctcacccaaacggctaaataagtcgcgggcataaggcatattttcatcaacaaggattttcacgtttgtgttacctgtatgagacgagagttaaccagacaagtgtgccataatctcgcggccaggcatacttgcgaagatttcaggtataaggatacgtaatgatacaacctatttccggccctcctcctgggcaaccaccaggtcagggagataacctgccgtctggcgcgggcaatcagcctttatccagtcagcaacgtacttcgctggaaagcttaatgacgaaagtgacctcactgacgcaacaacaaagagcagaactgtgggcgggtatcaggcacgatattggtctgtcgggagattcaccgctgctttcgcgtcacttccctgccgctgagcataatctggcgcaacgtctgttggccgcgcagaaaagccattctgcccgccagcttttagcgcaattaggggagtatttacgtctggggaataatcgtcaggcggtcacggattatatccgtcataactttggtcagacgccgctgaatcagctctcaccggagcaattaaaaaccattctcaccctgttgcaggaagggaagatggttattccgcaaccacagcagcgcgaggcgaccgaccgtcctttattaccggcggagcacaatgcgctcaaacagctggtgaccaaacttgcggcagcaacgggggaacccagcaaacagatctggcaatcgatgctggaactttccggggtgaaagatggcgagttaattccagcgaaactgtttaaccatctggtgacctggctacaggcgcgtcagacgctaagccagcaaaatacgccgacactggaatcactacagatggcgctaaaacaacctttagatgccagtgaactggcggcgttatcgacatatatccaacaaaaatatggcctttctgcgcaatcatcgctttcttcttcccaggccgaggatattcttaaccagctttatcaacggcgggttaaagggattgaaccgcgtgatatgcaaccgctgcttaatccttttccaccgatgatggacacgttgcaaaatatggcaacgcgtcccgcgctgtggatactgttagtcgcgattatcctgatgctggtctggctggttcgttaaccccgacgaaacgacagtatcgtgacaataattcccagcaccgcagagatcgccccggcaagaaataccgaagagtaaccaaacgtggtcgccagcattcccgcaagcggcccggagacgccgagggcgatatcctgaaacgcggcgtaaccacccagtgcggtgccgcgaacgtgtgaggggacgcgtttaaccacctccacgcccagcgcaggaaagataagcgaacatccggctccagttaacgccgcgcccgctaatgcgacccacgcccctggtgcttgccagagcagcaacaagcccacggtttctacaagcagagagacgatcgccactttcacgccgccaaaacggtccggcatccagccaaacatgacgcgcatcacgacaaatgcgccgccaaacgcggtaagagtaaagcccgccatcgcccatcctttgctggcaaagtagagcgaaacgaaagtcccgataaccgcaaaaccaacgccttgtagtgccagacctaaccctggtttccagataagcccgacaacgctccacagcgatggacgttcccccgccagggccggtactttgcgcactgtgccgttacaggcccacgccagtaagggtaatgccattgtggtgagcgccagtgcggcaaaaccgtaatggctatgaatcaacaggccaagcggcgcaccaacagcgagggcaccgtaaatagccattccgttccatgacatcactttgccggaatgttttggcccaacgatgcctaatccccaggtcagagcgcccgtcagtaactggctttcaccaaagccaagaatcaaacgcccgacgaccaacagagcaaatttgaacggtgcggggacgggcaaaatcgccgccagcagcaacgcgccccccgccagaccacaagctaacatcccctgaagcgccgaacgttttgcgccatattgatcggccagtcgcccggcgtaaccacgcgtcagcaccgtagccagaaactgaatcccgacggcaatgccgaccatagtgttgccatagcccagttcatgatgaacaaacagcgggataaccggcaacggtaaacctacggtcatgtaggtgagaaaaaccgcaaaagcgatgcgaaagagcgaaaaattggcagaagatcgtgtttcggtttggcttacagcagtcatgcattactccagaatgcagcgcaaggcgaggagtatccccgtctcatctctctgatttcagggttacggtgcgttggcaggatttaacgcgtacgtcttttctgaaggaaatcgacaaagcgggaagtttgcctggaactggcggcgattgtcaatgatgtgaaaaagggaaccatcgggttcccttttgcgttagtgccggaggccgcattggcgcgtaacgtcggatacggcgctggcgcgtcttatccgacctactccgaattaatctttcagcttgcgcattaccagcgtggcgttagtgccgccgaagccgaagctgttagacataactgtggtcagttcgcgatcggtcgtttcggtcacgatgttcagacccgcagcctgctcgtccagctcttcaatgttgatgctcggggcgataaaaccgtgttccagcatcagcagagagtagatagcttcctgtacgccagcagcgcccagtgagtgaccggtcattgctttggttgcagaaatcgccgggctcttatcgccgaacacttcacggatagctgccagttctttcacgtcgccaaccggagtcgaagtaccatgagagttcaggtagtcgattggggtatcaacaccgtgcatcgccatcttcatgcagcgcactgcaccttcgccagacggagcaaccatgtctgcgccatcagaggttgcgccgtagccaacgatttcagcatagatgtgagcaccacgcgccagcgcgtgttccagctcttcaaccactaccataccgccaccgccagcgataacgaaaccgtcacggtgagcgtcgtaagtacgggaggctttttccggggtgtcgttgtatttagtagacagcgcccccatcgcgtcgaattcgcaagccatttcccagcacagctcttcgccgccgccagcaaacacgatgtcctgtttgcccagttggatctgctctactgcgttaccgatacagtgtgcggaagtcgcacacgcggagctgatggagtagttaacgccgtgaattttaaacggcgtggcgaggcaggcagaaacgccggatgccatcgctttggtgaccacatacgggccaaccgctttcaggccgcgcgggccgcgcattgcgtcagcgccgaaaacctggaaacgcggggagccgccgccggaacctgcaatcaggccaacgcgcgggttattctggtaagcttccggggagaggccagcatctgcaattgcctgctccatagaaaggaatgcataaatggatgcgtcgctcataaagcgcacaactttgcggtcaatgaggccagtggtatccagttttacgttgccccagacgtggctacgcatgccggaatccttcagctcctgagagaaagtgatccctgaacgtccttcacgcagagatgccaggacttcctgctggttattaccgatgctggaaacaatgcccaggccagtaatcactgcacgtttcattcaatacctctgtaagtcgcacatagagtaagtttcgaatgcacaatagcgtacacttgtacgccgaacaagtccgatcagccaattaatagagaaatttgcgcagcctgacacacatcgctaagatcgagccaccgcctgtaagacgagtaacttacgtgaaacactactccatacaacctgccaacctcgaatttaatgctgagggtacacctgtttcccgagattttgacgatgtctatttttccaacgataacggactggaagagacgcgttatgtttttctcgggggtaaccatctagaggcacgttttcctgaacatccacatcctctgtttgtggtagcagagagcggcttcggcaccggattaaacttcctgacgctatggcaggcatttgatcagtttcgcgaagcacatccgcaagcgcaattacaacgcttacatttcattagttttgagaaatttcccctcacccgtgcggatttagcgctggcgcatcaacactggccggagctggccccgtgggcggaacagcttcaggcgcagtggcctttgcccttgcccggttgccatcgtttattgctcgatgaaggccacgtgacgctggatttatggtttggcgatataaacgaactgaccagccaactggacgattcgctaaatcaaaaagtagatgcctggtttctggacggctttgcgccagcgaaaaacccggatatgtggacacaaaatctgtttaacgccatggcgcgactggcgcgtccgggcagcacgctggcgacctttacgtctgccggttttgtccgccgcggtttgcaggaagccggattcactatgcaaaaacgtaagggctttgggcgcaaacgggaaatgctttgtggggtgatggaacagacattacccttcccctgctccacgccgtggtttaaccgtatgggcagcaacaaacaggaagcggcaattattggaggcggtattgccagcgcgttgttgtcactggcgctattgcgtcgcggctggcaggtaacgctttattgcgcggatgaagcccccgcgctgggtgcttccggcaatcgccagggggcgctgtatccgcttttaagtaaacacgatgaagcgctaaaccgttttttctctaatgcgtttacttttgctcgtcggttttacgatttattgcccgttaaatttgatcatgactggtgcggcgtcacgcagttaggctgggatgagaaaagccagcataaaatcgcacagatgttgtcgatggatttacccgcagaactggctgtagccgttgaggcaaatgcggttgaacaaattacgggcgttgcgacaaattgcagcggtattacttatccgcaaggtggctggctgtgtccggcagaactgacccgtaatgtgctggaactggcgcaacagcagggtttgcagattcattatcaacatcagttacaggatttatcccgtaaggatgacggttggttgttgaattttgcaggtgatcagcacgcgacgcatagtgtggtggtactggcgaatgggcatcaaatcagcggtttcagccaaacatcatctctgccagtatattcggttgccgggcaggtcagccatattccgacaacgccggagctggcgaaactgaagcaagtgctgtgctatgacggttatctcacgccgcaaaatccggcgaatcagcatcattgtattggtgccagttatcatcgtggtagcgaagagacggcgtacagtgatgaagatcagcagcagaatcgccagcggttgattgattgtttcccgcaggtacagtgggcaaaagaggttgatgtcagtggtaaagaggcgcgctgcggtgtgcgttgtgccactcgcgatcatctgccaatggtaggcaacgtgcctgattatgacgctacactcgtggaatatgcgtcgctggcggagaagaaagatgaagcggtaagcgcgccggtttatgacgatctctttatgtttgctgctttaggttcgcgcggtttgtgttctgccccgctgtgtgccgagattctggcagcacagatgagtgaagaaccgattccgatggatgccagtacgctggcggcgttaaatccgaataggttatgggtgcggaagttgttgaaaggtaaagcggttaaggcggggtaatctgctttggcattgtttgtcggatgcggcgtaaacgccttatccgacctacgcgttacctgtaggcctgataagacgcgataagcgtcgcatcaggcatggtgctccagacgtcacaacttactgctgtgaggcctgctgaaacaggtgttcccacatatcggtaaccagcgcctggtcacgcggtgacaattcacccgcgccaatggctttttccagactctggctaacggttgtatgtaccgcctgagcggagtggtcgtcaccactttccagttctgcgatggctaatgtcaggtggccacgcaaatacccactggcaaacaactcatcatcactggcatggtcaaccataccgtcgattaatgccagaatgcgtgattcaaactccgcgatcatcttctttcctcattgtaaaacgtggcgctggcttcagttgagcgcttccggccacgggaactgttccgccgtaagttccggcgtgtgataataattttgtagtgctttaatgaagcgtgccggacgttcgggaatgccgtttgccagataatccatcacctgcgcatgtacccgccgttgaaacaccacgcggtccggttcgaaatccccttccagattgtcgcagctaacattaaacggatatcccgccgccacgcagaacaaccagtccagcgcctgcggcttcacttcaacatcttcaaactgactttgcgtctgggcatcgcgtccgtccgggcaataccagtaaccgaaatcaaccaggtcacggcgcgctttcccggcaatacaccagtgcgaaatctcgtggatggcgctggcataaaagccatgagcgaagacgattctgttatacggtacttccgcatcagcaggaagatagatcggttcgtcgtcgcctttaatcagacgggtattaaattcatcggcaaagcagctattaaaaatctcaatcaactgctcatagtggtgtgtactgttcattagttcatccccaaccagtggaggatctcctgtccgtggctatcataaagtaatttggcactcatcaccgccgagacgataacgatcatcgggcggatcagcttttgtcctttgctcaacaccagtcttgaccccatgcgcgcgccgaggaactgtcctaccaacatcacaaatcctgtcgcccaaatcactttgccaccgagaataaacagcagcaaaccgccaatgtttgacgttgcgttaagtaatttggcgtgagcagtggctttggcgaggttgaatccgcacagcgtaacgaaggccagcgcgtaaaacgatccggcagccgggccaaaaaatccatcgtaaaaaccgacgcaaccacctgcaattaacgcgaagggtaaaccgtacatccggcgctggcgatcttcttcacccagctttggcatcagtaagaaataaagaccgatacaaattacgaggatcggtaaaatctgccgtaagacatcggcctgaacatactgcaccagtagcgcgccgctcattgagccgacaaaggtcatggcgatattgagtttttgatcgcttaaactaaccactttacggcgaataaagtagatagtggcggaaatagagccaccgcaggcttgcagtttattggttgccagcgcgttagcgggagacatccccgccgccatcaatgccggaatggtgagtaacccaccgccaccggcaatcgagtcgataaaccccgccagcatggcgacaaaaaagagaactcccagcagcagcggggaaaccataaacaggctattaaacgtttccattagatcacgtgctcatccagtagcgcctggcaggaaggcggcaacggaggcggtgtcttcttctcaggctttgttgttcccggttttggaggttcaaaccagctttgcagttctgccccgcaaccatcgcctggtggcggtaaaggttgatcctcacactccagactatcggcaggacaacgtaatcgtacatgcatatgcgcgcgatgctggaaccagggtcgcactttgcgcaaccagtcgcgatcggtgcccgcatcaaggcaaagttgttgtttaatcgccggattaacaaaaatgcgcgtgacgtctttgtcctgggcggcgagtttgatcaagctgaaaatttctggcttccacagcgcggggacaacgtgtttaccgtcgcgggaaactaaatctaacgcttgcgggcgcaagagctgcgcggaggtccagcgtgttttcggcagttgcaggaagatatcgacatccagtccggtctggtggctggcgtgaccgccgttgaaacgaccaccagcaggcatccccatatcgccaatcagcaccgtacccatgcccagattgctcacctggcgactcagacgctggataaacatcaccaggtctgggtgaccgaaatagcgacgctgatcggtacgcatgacctgataatgttcggactgtatcggcaacgtgtcagcaccgacgatacagccattagaaaaactgcctatcgattgtgcgctacccggcacaggttgggttattttttgccacggcgtcgctgccaggctggcgctactggcaagcagggccagcagcgcaatcgcggttttgttcattttttaccagcgtggaatatcagtcttcacatcggcattttgcgcccgttgccgtaacaggtgatccattaaaacgatcgccagcatcgcttccgcgatcggcaccgcgcggatcccaacacaaggatcgtgacggcctttggtgatcatctcaacttcttcgccaaagcggttaatagtgcgccccggcacggtaatgctggaggttggcttcagcgccatatgggcaatgatttgctgcccgctgctgataccaccaagaatgccgcccgcatggttgctctggaaaccgtctttggtgatttcgtcgcggttctggctgccacgcagcgctaccacgtcaaaaccatcaccaatttccacgcctttcaccgcgttgatgctcattagcgcatgggcgatgtcggcatccaggcggtcaaagaccggctcgccaagtccggcgggtacgccactggcaacgacggtgactttcgcaccaatagagtcgccttcttttttcagcgcgcgcatcagttcatctaacgcgtcgattttgtccgggtccgggcagaagaatggattttgctcgacctgagaccagtctttgatttccagtggaatgtcgcccatctgggtcaggcaaccgcgaatctcaatgccaaatttctcggcgagatattttttggcaatcgcccctgccgccacgcgcatagcggtttcacgggcggaagaacgtccaccgccgcgataatcacgcaggccgtatttttgttcgtaagtgtaatcggcatggcctggacggaagacatctttaattgcgctgtaatcctgagaacgctggtcggtattttcgatcaacaagccaatgctggtgccagtagtaacaccttcaaaaacaccggagagaattttgacctgatccggctcacgacgctgggtggtatagcgcgatgtcccagggcgacgacgatcaaggtcatgttgcaggtccgcttccgtaagcggaatgcctggcggaacaccatcgacgatgcagccgagcgccagcccgtgcgattcgccgaaggtggttacgcgaaagagttgtccaattgtgtttccagccatcacggctccgttattgttgtgtttgcgtgtttacttaatctttataaatcgcgaaatgttcacgggccgccagcagctgctctttggtgagcataaacacaccatcgccgccgttatcaaactccagccatgtgaacggaacatccggatattgttccataagatgtaccatgctgttgcccacttcacaaatcagcacaccatcatcagcgaggtaatctgccgcgttaccgagaatgcgacgcgtcagtttcaggccgtcggtgccagatgccagaccgagttccggctcgtggcggtattcgtttggcaggtcggacatatcttccgcatcgacgtacggcgggttggtgacgatcaggtcgtactgcactttcggcaagtcacggaacaagtcggaacgaatcggaatgacgttgtggatcaaaccgtgttcttcgatgttctgttcagcaaccgccagcgcgtctggagagatgtccaccgcgtcgacttccgcttccgggaaggcataagcacaggcaatggcgatgcagccgctaccggtacacatatctaaaatgtgctgcggttgcttactgatgagtccggcaaatttattgttgatcagttcaccaatcggcgagcgcggcaccagcacgcgttcatcgacgtaaaattcatgaccgcagaaccaggctctgttggtcaggtaagccaccggaatgcgttcgttgacgcggcggatcacgcgctcaacaatacggtgtttttcgctggaggtcagacgcgcggtgcgcatgtcttccggaatatccagcggcaggtagagcgaaggcaacaccagttgcacggcttcatcccacgggttatcggtgccgtggccgtaccagatattcgccgcgctgaagcggctcaccgaccagcgcaacatgtcctgaatggtttgcagctcatttactgcttcatcaacgaaaattttatccacgtattcctccagggcatgatcgcaataatttcggcggctagtttgccatgaagatgacgataaatcagcattcacgcgcggtgagtgaggaaaaatacgtttaaaacgatcgattgtgctacgagtcgggtaaactgtaggaaaattagaaatagagaaagataaatgaaaaagaaaacaacacttagcgaggaggaccaggcgctgtttcgccagttgatggcggggactcgcaagattaagcaggacacgattgtccaccgaccgcagcgtaaaaaaatcagcgaagtgccagtaaagcggttgattcaggaacaggccgatgccagccactatttttcggacgaatttcagccattattgaataccgaaggtccggtcaaatatgttcgcccggatgtcagccattttgaggcgaagaagttacgccgtggcgattattccccggagttgtttcttgatttacacggtctgacgcagctacaagccaaacaggaactgggggcgttgattgccgcctgccgccgtgaacatgtgttttgcgcctgtgtgatgcatggtcatggtaagcatattttgaagcagcaaacgccactgtggctggcgcaacatccgcatgtgatggcatttcaccaggcaccaaaagagtatggtggcgatgcggcgttgttggtgctgattgaagtggaagagtggttgccgccggaattaccctgaatattaaaaggtggatgagtcgggccatttagccttggatactggcgtctcaaccctggcgataatgaacgtaataatcgggcattaattgaaaaacgtaagcagctttccgacagccttctgtgggctaatggcattgacccttcagaggggcttgaggatgacgacctgctgcaagcgcttatcgacgaattactcaccctcgtcgacggttatctggcacctttcgctcccgtgatggcgaatattctaaaaaactggatgaccgcatgacataacggacaacggggcctgatggccccgttgtgtggtgtatacgctacagctcgttgagcgtgtactggaagcggcaggtggaatcaatcggctggcggctgctggtatcgacacgcaccaccatgtcgtgcagttgcttgtcagtgatgggatgcctgtttggcgccaccgtaacattagcattatcacagcctgatgatgaaaacgtgatcatttgcgcaacccagcgacagtaagcgccctcttcattcatttgcgagccatcacatagtttgccgtctttcatcagataggttgaaagcgttttttcaatcacaccccccgtcgattgcaaagacagtgttttcgttttattgatatagttttcatcccacgaaacatcatacggcgtaactgacacggttgggcacacggacacggttgcatttggtccataatagatatctttatcaacagaaccgaccacaacctggctggtggctctgatactcactaaccacgggcagcctcccacatcaccatcgacggtaatatccagaggcagcttgagacattcccagcggctgtctttggcttccagtgcctccatgcccggacaaaatgaattatttacaattgtcccatcttttaccgtaatcgtcggcgcaggagaactgcccgttcctgtccatgtgcgattgggtaagttgccaagcgtcataacataattactttgataataggtaccgtagtaaacactcgaaacctcagcaacatcaagatacagttcgacctgactattccagccaaacgtagcatagtagatatacacattacgaaatgtctgccccatcccggcccgactaccgagcataaaaaccatcaggatcaaaagacgaaacagcaagttagtttttttcatcttatatgtactcaaacgttgcggttaaggaggcggtaaactcacccatcgtcacttcccgcccgcttttcgcctggagccaggcattaaaattcagattgttattgccgttactcagcacaaaggtcgcgccgctggtattgttaatcggcaccggtgttccatcggttttttccatgccaattccgacaccttgcgccgccgaagatacatccagcgccagaaagcccggctgttcactgtcttctgtaccggtcagcgtcacccggacttcatactgagctggccctttgcaatctttgagctgaaacaccactggcacccgcgcagactgcccggtcaccatcaggtctttacggctaacggtgggaaaatgcacctccgccagcgactcgccctgaacgactaacgtgcaggacttgctgagtaaattgccgtagaaatgcaggttgtcagccgcctgaacatggggcgtcagcagcaccgtcgccagtacagccgcgcagtgagatatccgttttaggttcattggtaatccacctgtaatgttgcgtaggcagaaaaggttccgtcgctgagcgccgcatcattggctttcaccggcacagcttgcagcgttggcggcgttgacgggtcaattttcaacggtgttcccagcttaaacggctggccgttttgctgtagctcaatccccaggccgctaacgtccgtttcaatggcggaatcatcataaggggtttggctgcccgtccaggtcaggctcatctcccaggcgtcgtcgcgcacatcggggtcacatgtgatggtgtaaggcacatcctgacggaaattatcgccgttaatgttgtcgataatgacgttgcgaaactcaacttcgatcgtcttaccatcgctgatagtacaggcgggtggcgaaaccagcgtgccgtgaaaagtaacgtcgttaatcgcggcctgcgccaggccagcaaaaccgtaaattaagcaccatgcgagtcgtttcattggtagtccaccaccatggtcatggtcgcattaaactccgatgccatcagttccacaccgctctgcttcaccggaacggcttcgaagtctggctgagtattgatgttgaacggcagccagctactgttacccactgccaccagcgaatggtcagcggcattctgaatacgaatgccaaaaccgctgattccagtactcagcaccgtttcgccgttgatggtcgtggtggtggcctgaagctgcatttgcaggtcgtcgctgacactgtttgagcagttcagggtgtagcccactgcctgacggtagttggcaccatcaatgcttttaataatcacattgccgaactccaccgcgcttccctttaccgaacagggcggcggtccatccaccagcacgcgcaacgtcagattgacgattttgccgcccgccattgccgggaaaacggtcacgccacaggccagcaatagcgcggcagatccggtcagaaagaacgctttcatgttgcttctcccgttatcaacctttgctgctttgatcttcatccaccttgcaggtgttcccttcacaacggaagatcagcggcatgcgcgcgccgtagtcgttgatataggtcagcaccggggcgctcgccatttttgcctttaacggttgtgacgttttcggtggcatcaccagcggtttaaacccggcggcagtcagccctttcttctgtgtgctggcatcgctgatgatgacgtggtacggcgtcgggttattgacggtatagtcctggccactgcgcgtgagtgtgaccttaaactgccacggtcttctcatgtcaatcttctccagcgcctttggtcgccagaacagcttgatgcgcgtttgcagcgcaatttgcagggtgttggctttcccggactttggcgggatctcacgcacgttgtagtagaacaggctttctcggtcggacggcagtgtgtgaatgtccggcagcgcctgaatcttcacctggccgttcatcatagcgtcaatacgctgcaccggcggcagtactgccagcggcgaagtgattttgttgcccttctcgtcttccagccagctttgcgccaggtaaggcagcttttcgttgttgttacgcaacgtcacgctgatcgatttatcgctttcgttaaacaccagacgggtgcgatccggggtgaccgatgcatgcgccgtcaggctggcggtggtaagcagtgccatcagcgctgtgctgacgagcattggacaggataatttataagacattgatcgttccttaatcagattattgagttgctgaaattgacgtcggcgcttccgttggtgtgacttgccgcgtctggtcctgaataacaggcttaatttctggcgctgaagaatcaggggctgccgttcccttttgttcacacggcaacaacagaccgctgaacaaatcggcaggtagcggcttcggcaatacgatctcgcattgtgcgctgccttcccagaacaccatcatatgctcgtccgcattgacccccgccagatagacattgccttcatcatccacaatgccaacctgctgctgctcgtcgtttttcacttccgcgccaaacggcgggtagctaccgtcacgcaaccgcagtaccgccatcgctttttgcccgctgatcactttgaatttacgatagccgattgcgccttccgtcagagtcgcctgcaccaccgactgggtggcttccgcatcttccggcaagttgtttaaatcgatatacgcctgattgcgatagtagttgttaatatcggcgaccaccgccttgccaaacatattggtgtacaccggcgcgccgttgctttcgaccggcacgttggcaatcccgtcggcgtcaatcagcaggcgcgtgccgcccatgttctgggtacggtgcagcgccccaccatgcgcggtcagcgttgccccgccctgtaaggcgatccccgccgaacggtattccccttcatggtagttggcgctgagatcaaccttcgccagcgaaccgtcgtggctcagataaccatccgcgctgccgtgctgctcgctggtgccaacgttaacctggtagtgcgttgcgtcatcgacgcgcttaaagtaaccgacctggctgctgtccgacccgctgccgtaggaaccgttgtaggtcacggtgctgctgtcgctccacggaatgctcatactgaggtacatccccttatccgcattatcgtcatattcgtagcgatagccggtcaccgagatgctcatgttgcgaatgctccccatattaaaatagtgggaaaacatcaggttatagtttgtctgttccgggcgatcccagtaagtacgatgggagtagttgagatagatcgaaacacccgcagcggcaaagttctggttataggtgatcgtatacatctctttgtcgttaccggtccgcgccatgtccgactggttcgcgtccagatactcgctcatggtcatgaagttcttttcggagaaacggtagcctgcaaaggtgacgcggctgttgagttcgtcaaagtctttggcatagctcacgcgaaaggagttgccgtccagttttcctttgccgtatgcgctgtcatgatccaggttgacgtgcgagtgagtcacatcgaacgccagcgcgccaaactgtgcgaggtcgcgccccacccccatcgccgccgactgatagtgtttatctgccagcgcaccaccgtagagcgaccagccatctgccaccccccatgacgcttctccgccggagaaaaagccgccttcggtcttgtggttccagtcttccggacgccccatcatcactttgtaacgcacctgcccctggcgcgtgaggaatggcatagatgcggtcgtaacgtcatattcctgcacctgaccattctgttcttcaacgcggacgtgcagtgtgccggagacggagtcgccgatatcctgaatgcggaatggcccggcgggaacctgggtttcgtaaagtacccggcccatctggctaatggtgacttttgcactgctgtgcgccacgccggaaacatccggtgcatagccgcgcaggttgggcggcagcatctggtcatcggtgctgacgctgctgccgatatagttaaagccgtcgaaaatatcggaattgagataatcttcccccagcgacagcttcgcttttaaagagggtaaggcccgccaggcgtaataacggctccagtcccagtttttgctcgttgtactgttactgctgtcatcgtcgtcatcgttgctgcgggtgtgctgataatcactttgccagtctgcacggaaacgccatgcccccaggttcgccccaacggtaccgttgccgctgatatcatgtgagtcctcgcccccctgctcctgatggcgagtttgcgcattgaggctgtagtcggcaatcaggccaggaataccgtcgtcccagcgtgagggagggtcccagtcgctgctggtatattcgaggtaagcctgtggcactgtcagcagcaacgccgactggcttaaatcattctcgacttccatcccgtctaattgacctggtttaaggcattcatcgttgtgcgtccactgcaggctttttgctatcccttctttcagccccagcgccgccactaactcaggtgtcaggcaggcatagttttttgttggatcgttttcagagacgtaccagttaatgtcgtattcatcagaaaggggttgtttatttataaatacacgtaaattatatttacccgcgtcgacataccctttttttgaaaacttaccgagatcaattttcgtatcgccctttaactcaaggaaacgggggtcaaattgaattgaatcatcagcccatgcattgactgacccaccagagattgccagcgcaatatagcaggcgattccccgcagccgaaaatttgagtgattaggcatacacatatccgtttgtgaaacagtcgtaaatctgttgcgtgttgaataaccccacagcagaacgctgtggggttgtcacatcagagataagtaatctggaatgtggtcagggtttcgaactggccgagatccggcgcatcggtttcacccaccagccaggctttaaagttcagcgtttgcttgtctttacccttgctggttgaagtatccatcacgattggctgaacaatcttttcgcccactttataacctttgccatgggtatcgccgattaccaggctcacgtggttcatggcaacaccgctgtcaacattgaataacgcatagttatccgtgttggctggccccgcgtagttagtaccggtgaacgtggtctccatgtttgtttcagtggtaaacacgcaatcctgtaaacggatctggaaatctttcggtgtggtagtgccaccgccggtcagtttagccgcaccgatgtcacccatatcgacttccagtttgtgatcgtctggaacgatagagcacggggagtcttcaatggtgccgtagaagcgcgcggtaccgttgttgcctgctgcaaaagcagaactggaaacaactgcgcccatgaccatcgccgcagcaatggctgttttggcaaacttactcattatttgtccttaaatcattaagagttataatataatcacctgacataaaattaatatatattatgcccgatatttatagttagccattgaacatatacactccaatataatcatagaatgtaaacaagtattctctggtgtgtctgtatgttggtcttatctataaaaaaactcaatttagtaatacttaaacactttatgtagattttattaattaatacatctacaaaatactttcaccactttccaacaaaaaaacatgcgaattatcaacaaaaaaacaaaccattataatcaacaaaaatgaattgcttataaagcacactaaaaaaattataatgaccttaccattatttattgctaaaatttaatattaattaaatcaataaatatatattcaagacacaaaaccattatcttctttattttattacgggattcaataatgggaaaatataataactatcgagagttgttaaatattaacaacatttagacaagaaaaagaatgattgtatgacggagaaactgcccggtgtacgcgcacgtaaccgggcattgattgcttaaattgcttttgccatcttcaaattacaagggctcatttgccagttgaattggccttttccgctttcatcaagcgttacgctggcaatcgctgaagtggtaaacataggcggcgtttcgcccggacataactcggcaaccagatacccgactaacggtaagtgagagattaccagtaccgaagcaacaccttcattggtcaacgcctgcaaataggcgccgaccagaccaacatcgccgcagggcgttaactccggcagaacttctgcactggaaggcaggttcagacaatcccctacttcttccagtgtttgctcggctcgcaggaacgggctcaccagaacgcgttcgatttccactttttgacctttcagccagttcgccatcaggcgagattcgtcacaaccgttagtagtcagaggacgaaccgaatcactggcggcatcgagggctgcgtcgccgtgacgcatgataaaaacttgcatattgcaccgcttttgttaaccagattcgcccgttttctttcatctgaaaccagagaaagaaaacggtggccggcattgtgccttatccattcaccgaatgaaacgctgttttttacctcaatggcgtaagtatagtcaatatgcgtttacattttgagcaacactccgccattcagcgcggattcatatagctttgaccttcttattgcaggtcagttgcagttgttttccaaaaactttccccacgcttgctcatctcgactaaacgctcgcaaggggtaaaacgggaaccatactgcgtggccagtcgttgcattattgcaaccacttcgcctgcgccgagagaatcgatatagcggaacggtccaccgagaaatggcggaaaaccaatgccaaataccgcgcctatatccccgtcacgcacgctacggataacctgctcgtccagacaacgtactgcttcattcagcatcaacatcacacaccgttcagcaacctgcggtgcggagagtcgcccctgcccttgtgcgccaatgagcgggtaaatggcgggatcgacctgttttttgcttttacgccctttctgaccataaagatagaaaccccggccattttttctgcctttgcgatcgtcgttcaaaattgaagaaacaacatttgcaggcgcgctaaaacgttctccataagcggcttccagtacaggaataattttagtcccggtgtcgattcctacctcatccaaaagttggattgggcctaccggaaaaccaaatttcaccagcgcggcatcaatgtgctctacccgttcaccttcggtcaacatgcggatagcttcattaatgtaaggcgctaaaatgcgattgacgtaaaacccggctttgtcacgcacgacaatgggcgttttgccctgttttttcgccagttttactgtggtagcgatggtttgcgccgatgtccccgcatgaggaataatctccaccagcggcattttttccaccggactgaagaaatgcaggccaataacttgctcaggtcgcgcggcgtgagcggcgatatcggcaatcggtaaagatgacgtattcgaagcaaagatggtatgagcggcgcaattttgctccacttccgccaccatctgttgttttaattcgagattttcaaacaccgcttcaataatcagatcgcgatgggcaaagccgcgatagtccgtcgttccggagattaatgccagctgtttgtcacgttcgctggctttgagatgacgacggcgaactttgccctccaactgatcccagctgtacttcaatgcatgatttatgccctgcgggttgatatctttaattctgaccggaagccccgctttacaagcagtgacataagcaataccgccgcccatcaagccaccacctagaatccccacgctgtttaatggcgcaggcggcgcatcactgccgggatcttttttcacttccgtactggcaaaaaagatattgcgcagcgcctgtgattgcggcgtcatcgccagttcaccaaacgcccgagcttcggcgtcatagccactgctggtcccctgcgctaaaccggtttcaataacgtcaagaatgcgtttcgtcgctggatagttaccctgagttttttgctctgttttcttgccgaccattttgaacagcagcgcacgacctaacggccccgccagaatacgctcgcgtacaggtagagggcgtgaagatggacgatcctgctttgccagctcaacagcggcttccagcaaaatggagtgcggaacaacgtcatccaccagccccagctttaatgcctgtttcgcccgaagttgttttccggtgaggatcatctctaatgctgtgctgacacctatcaggcgcggtaaacgctgggtgccgcctgaaccgggtaacaatccaagttgtacttcaggcaaaccgagtaccgttttaggatcatcagtacacacgcgaccgtggcacgccagcgccagctccagcccgccgcccaggcaagcgccatgaatagccgcgataaccggaacgggcaaagcatgaatctccgccattaactgttgaccctgccgcgccagtgcttccgcttcttgcgccgttttgcagttggcgatcatattgatgtctgcaccagcgataaagttgtccggtttcgcggagataaacaccacaccgcgcagatctttattttcgcggagttgtttaataatggcgcgcacctgcgaggcaaactccgccttcagggtattcattttctcacccggtacgtcgatggtgataacagcaatgttgtccagacggacattaagggtaaacgctgatgccatttccattattccgcctccacaactattgccgcgccaagcccacccgcagcacaggcggtcactaatccaaatccaccgccgcgacggcgaagttcatgcaatgtctgggtaatcattcgcgcgccggtcgccgcgaagggatgcccgtaagcaatcgaaccgccaagcacgttaaatttgctatcgtccacttcgccagtggcatgtgcacgccccagtacatcacgagcaaaacgttcactacccagcaactgaatattcgccagtgtctgagctgcaaaggcttcgtgcatatcgatcaatgtcagatcgctcattgtcaaaccggcacgttccagtgccagcggcgttgaccaggccggaccgagcaacatgtcctgccagacatctatcgcagtaaatgcgtaactgcgcagataccccagcggtaccagccctaattctttcgcccgcgattcggtcatcaggatcaccgccgctgcgccatcggtcagcggcgtactgtttgctgccgttaccgtcccgtgtttacgatcaaacgccggacgcaactttgcgtaatcagcaagcgaggaattaccgcgaatattgttgtcttcggcaagcggttgtttataaggagggataaaggcagtcatcacctcttctttgagtttaccgtctgaccacgcctgagcagcacgctgatgcgaacggtgcgccagtgcatcttgctgttctcgggtgatgccgtaggttttcgccatttgctctgcggtgtcccccatccgcaagccggtagaatactctgctaccgcaggcggtacgggcattaagtcgcgtaaacgcaggcgagagaagagtttcaggcgctggctcattgtgcgggctttgttgacatcaaccagtacgcgcgccagttttttactgacgccaattggcaatacggaagaggaatctgccccaccggcaatccccgcgcgaatagttcccgccatcaggctttctgcgacgtttgcaaccgcctggaaactggtagcgcaagcgcggctgacgctgtaagcatctgtatgcacattcattccagtaccgagaacaatttcacgcgcaatgttgggggcttccggcatttgtacgacctgaccaaagaccagttgttcaatcacttcagcggggatctcgctgcgtgccagcagttcgcctaccaccatcttccccaaatcaacagcaggaatgccatgaaaagccgtcgcctggcgggcaaaaggcgtacgtaacccgctaacgatggcgatacgatcgccctggcgggtaaccagcggtaaaacctgacccataacactcccctgtaaaaaaataaataaagtggtctgacctgatcatagtcttaaccatttttttacatttagccaagcggagaaaaaggaaagtgggagctatgacacagtgaagacaggagaaagaaaagaaaacacccctgccagcaactgacaggggcatacgtacccgagaggaattaacgcagacccagctggaagatcagcatttcagcttcgcaggcaaaagtgaaatcgatatccaggcgcacaccgtcagactcttcagtgaaagtcggggtgattttgcacggttcggattccacgctacgggctttttcagtcagcgccgccagcgtttgttctgcttctgcgcggtttgcaaacacacggctgtaagacgcggtgcagtcggagttgtccataatggtgccaacatccatacagcagcaaaccggggtttcatcagcactacatttactcatcgttgatttcctctgtatgtgcacccaaggtgccagataaacgttgtggatattttacgcttccggaaagtgctgctccagttgttaattctgcaaaatcggataagtgaccgaaatcacacttaaaaatgatctaaaacaaaattcacccgaatccatgagtgcgccacctcccaattttgccagctggatcgcgtttcttagatcatatctgaaaaaagatagaaacatacttgcaacattccagctggtccgacctatactctcgccactggtctgatttctaagatgtacctcagaccctacacttcgcgctcctgttacagcacgtaacatagtttgtataaaaataaatcattgaggttatggtcatgagccagaaaaccctgtttacaaagtctgctctcgcagtcgcagtggcacttatctccacccaggcctggtcggcaggctttcagttaaacgaattttcttcctctggcctgggccgggcttattcaggggaaggtgcaattgccgatgatgcaggtaacgttagccgtaaccccgcattgattaccatgtttgaccgcccgacattttctgcgggtgcggtttatattgatccggatgtagatattaccggacattctgatttaaccggtcagagtgcaaatgctaaaaatatcgcaccgacagcatgggtacctaacctgcactttgttgcgcctattaacgatcagtttggttggggagcgtcaataacttccaactatggcctggctacggaatttaccgacaactacgctgctggtatctatggcggtaaaaccgatctgcaaacaatcaaccttaaccttagcggggcttatcgccttaacaatagctggagttttggtcttggttttgatgcagtttatgccaaggcaaaaattgagcgttacgccggttcgctggggccattgttgtctcaacagttgattgcccagggtgtacccgcttcattaaccaatggtattaatactccggactctcaaattgctcatttgaaaggtgacgaatggggctttggctggaacgcgggtattctttatgaactggataaagataaccgttgggggctgacatatcgttcagaagttaaaatcgacttcgatggggattacaaaagctccattaacccaaatctgaacaatattttgggtaacatgggcttaccgtatggcacgatgggggcaacccaaaatggatccttaacgctgaacctgcctgagatgtgggagatttctggttataaccgtgttgcgccgcagtgggcaattcactacagcatggcctataccagttggagccagttccaggaattgaaagcgaaaggcgatagtggtcagactctgttctataaagatgaaggattccgggacgcgtatcgtatcgcgttgggtacaacctactattatgataaaaactggaccttccgtaccggtatcgcttatgacgacagcccggttccggcagataaacgttctatttccattcctgaccaggatcgtttgtggttaagtgctgggttaacctacgcatttaatgaagatgcatccattgatgttggcgcatcttatatgcatggtcagaaagtgaaattcaccgaaggtgaaggagcggcagcttattccttcgagtctgaaggtaaagcctggctgttcggtactaactttaactacgcgttctgataacgcgttagcttaataagaaaaaaggtgagttttgcgactcaccttttttgtttgtttcttattcagaatcgatatcttttaaatcatcctgaatcgcttgcgcgttcggattttcctgcggtttgagttcaccgccattagcgatgaaatcatgacgctggaagtacgcttcacgcaccataatataaggatcggaggactgacgcagcagaccgtcggaatccaacaactgcgcacgagtttctatcccttcaagcgtccatttacccacagacatcggccaggtcagccaggaaagaaccgggtaaagactatccgccatatcaccaccgtcatcacgcagcgtgaagctaccgtagaacggtaactgaacgtacggcccataacccacaccataatgaccaagcgtactaccgaagcggtgaggttcagtccgttgcagtttcgggttcgccatccctgcaacatcaataaagccgcccattcccaaaatggtattcaggaaaaagcgggtaaagtggaccatcccctgataagggtcgccctgcaagaagtagttaaccatcaccgcaggttcttcaaggttgccggtaaagttgctcaaaccgttacgcgcaggttgcggaacataatcacgccaggcgacagcgaccggtcgaacaatatacgggtctaatacattgaagttgaagttgtacatagtgcggttaaacccttctaacgggtcagaacgcccttgctgatctgtaccggaactcgcacaccccaccagaagcgtagttcccagagcaagcgccgacaggcgaagcttcataaatgtctccctgtttttttatggcttatgcagtttgccatccatgacggaacgataccgtatccgcctgtttaggtgtgggcgattgtaacagcacgtcaactgatgtccagacgccctgatttgctgatttgatcatagcctggtaatcgccgccctgtaggctacttgattctatagaaacagaaaaaggcaaacgcggccttttctacattttcagagtaactcccgccagttgcgagcaaaaaagccgctacgctttagctatacgtgctaattcaagagaagagaccatggacaacgacaaaattgatcaacacagcgacgaaattgaagttgagagcgaagaaaaagagcgcggtaaaaaaatagaaatagatgaagaccgactcccctcccgggcgatggcaattcatgagcatatccgccaggatggtgaaaaagagctggaacgcgacgcaatggcgctactgtggtcagccattgcggcgggcctgtcgatgggcgcttcgctactggcaaaagggatatttcatgtcgaactggaaggcgtgccgggcagcttcttgctggagaatctcggttatacctttggttttattatcgtcataatggcccgccagcaattatttaccgaaaacaccgtaactgcggtactacccgtcatgcaaaaaccgacaatgagcaacgtcggcttacttatgcggttatggggcatcgtgctgctgggtaatattatcgggacaggtattgctgcgtgggcatttgaatatatgcctatcttcaatgaagaaactcgcgatgcatttgtcaaaatcggcatggatgtgatgaagaacacccccagcgagatgtttgccaacgcgatcatttccggctggctgatcgccactatggtatggatgtttcctgcagcgggtgcggcaaagattgtggtgattatattgatgacctggcttattgccctgggtgacaccacccacatcgttgtcggttctgttgaaatcctctatctggtgtttaacggcacgctgcactggagcgatttcatctggcccttcgcactacctactttagcggggaacatctgcggcggcacctttatcttcgcgttaatgagtcatgcacagattcgtaacgacatgagcaacaagcgcaaagtagaagcacgtcaaaaagcagaacgtgcggaaaacattaagaaaaatgataaaaacccggcataaatggcgagggtttaagcaatcgagcggctgtgtacttaccccgtagtccattagcgggtatactcatgccgcattgtcctcttagttaaatggatataacgagcccctcctaagggctaattgcaggttcgattcctgcaggggacaccatctatcatccccctcgcaataacccacttacaatcagtgagttatcttaaaatccttagtatagtcaaccagtacttcgatatgtgaacgcaaatcatcatgcattcgtgaacttaactggaaacctcccccattcgatgtcaaaatgactaccccaataagttgccaataatcaggctaatcaatacgggtcagtcttgctggtcagtgaccataaaaatgtcacctcatattagacacagcaaataattgtgtcgattaaacatactaccttcagcataaccgttcctgaaaaattattatattcagtaatctgaataaattactggcctgctatttttcttagcaaccatatttagcagcaagccagcaaatctgaatgattacagatgctggcctgctgaatctcccttctggaaatcgtcagaatctagtgattacttactttgttctggtttctcttcattcttattgtgcacttccactttgggtaactgattaaaaaccagattttctttttcaaccagagccatgacttctttggtgatatcagctgactcgttatgcgcaagcacaacacctgaagacaatacagcaatatttttaggattgtcttttctccatgtacctatggcattatctatcgcacgggataacaccatttttgcgctattttcctcaataacacattgtcgctccagtttttgtctggcatcaagaagcagcgcctctttattcgcgttatctgcgaatgctttttgcgcatcctcatagcctttttcaagaatactcttaacctcattcagatgctttctgaccatgtctccggcggcagactgattataaatagcatcgatattaacaactgcaatttcttttgactttttcatataaaaaacaccagtaagtacaatcagcaacagcagcactactgcattaacaacagaaaatttcattacagaactcattatgacaaccctgaggtggcaggaggtcccctcctgccactgtgtgattagaatatatatttaatacccagcattgcctgggcatcactgtaccctttatcgccagcctgaacaccaacattgccccagacattcaggttatctgacaatttaccctgaacacccgttttgacttcagcaatatttgtagctccgtcctgactgagtgccgtattatccattttgacaccccagctccgtgtattatggatccagttaacttccacaaatggctcaaactgatgcgccttattatcatcagacgcactcttacctttcaggtaagttctgacgcccagacgactctggatattaccgtctccgctgagctgaactttcgtgccattcttctccgtatgctcactggctcttacattcatccacgtgatctgggactgcggctgaatataccagtcatagtgactaccctggctaccggtaaattcgccggctttaaaggtataacccgcttccactgaaccggtaaatccacgggatttccaggactccgcagccagtttttcaccattaacggtattattaaaccatccgtactggatccaggtatcgacataagccccgttgtcattaccgtcattctgctgccacgttccgtataaaccggtgctgtatccattgatcgcacctttagatttatatcccgaaagcgaggatgtcgtggaactcttctcatttccataaccggccataatcccctgttgcagacggtcctgaccgtcagtccattgcgcaatgctgccacccagttgcacaacataacggttactttgcgtattcagctgtgaactgctgtccttccagcgattatgaccgccgatatgacgcatccacatacttgttgctttcttctcaccagtaaacacatcggtatagtaagtttccccctcacgatcgtgcattctgatgttgaacagcgtgttggctgccgctatgttcgcaatataagagcccgcttccggacgatagaccttctgtacaggtttatccggcgtggggtgtggctgtggctgcggttgtggctgcggctgcggttgtggctgcggctgcggttgtggctgcggctgcggttgtggttctggcggcaattcagaacgcagataccagttaccgtcagtaccacccgcattacctttatgcaggaaatattcccacgcccctgccaccgcacggttctgcagtctgaagttaccgtcagactgcccaccgacatgcacaatctcaatgccgtcagcggtctgagccccctggccccggacattattcaccaccacgccggtatcaccggaggtgttacccgtgacaatcagtttgtcagtggtagaagtatcatcccccagcacggtattgataattaacgtaccgccaccggtgtaatcgccatttacggtcagggtatttcctgtcttaccaccggccagacgaatgacgccggtattggtcagtgagccaacggtaaaattgcccacctctgccgtttcataacctgagagagcattcagtgatgccagtgttccctggttattaacctgacccgaaacggtccccagcccactcagtgtgccgccattaagaacatgaatgtttttggatcctgacaacgtcgcgccagcggcacgggtgactgaatcatcaccgacaatcagaacgccactctcaaccgtggtatcaccggtataagtcagctcatgattaatgatcagattacccgccccctgtttcaccagagcgccggagccagtaatatcattcttcagtaaccagtttccactggcggtaagccaggtgacaccatcactgtcaatcagcccggtgcccaggtgtttttcatctgaagcccgcagagcagcatctttctgcacacggaattcaccgctgaaattactgttatccccggaaagcgtcagatcagtggtgttcagtatacccactgaaccttctccggaaagcgatttactcaggttactgctgactccgctaccgtcggcgatatcaatcgccaggcgatcattaaggctttcaaagctgatggagccctggcttcccagcccctgtgcgccgttcatttcaaccagcgccccctgggtaaggctggcattaccggtaaacccgatattggtgccatgtaccgtcagattgctgcccgtgacagccagcgttccctcaccggacagcacgttgttttcaatgatgccaccattatcatcccccggctgacgctgcgtgccgctgaccgttagtacactaccgctatcaagctgaatgtgcgctcccgtttctgtctgcagtgcaccgacagtctggctgtatccgtttgttctgaagacggcattgctggcgacgttcagattacctgttgcgccaagtacattatcatttgccatctgtaatgtgccgctgcgcaccagcgtatccccggtgtagttattaccgccgttagacagtgtgacaacctgccccgcagcttcgatggccagatcccctgcccccgttaactgtgcgccaagatctgtctgcagtccctgggcattcgctctcggtgtcagcaccagcgctttatcaccggttccctgtaaatccagcgacttcagcccatagcctatgtacagtccgtcacctttaataccgtcggagcttcccagcagcttatagtcataatttccctgagctacaacttcaccgccctgagtgacatcaaacgtctgactgtgagaaatagcctgcccgttttcatccaccagttgcagttgcccgccagtaccggtgacggtacccgctgcattcaccagcgtgaccagggtctgcgcatcatcctgctccagcaaattcttacgggtatcaacagccggaatatcattaatcacttcatctggcatggtgacctgaattgtgcctttcccccggatatccagcgtacctgcagcagaggtttcaatactgttgctggcaatggtatcgcccggcataacggaaccaaaaatcagcgttccgccattgaacccaagaccgccaatctgctgaacaccggagccaaccgttgtgatattcccggtttcagacatcagcattgcatgggttaacccgctcgtattcagcccttccagagcaaagctactagtacccagcttcagagttccggcaaattgatccccgacgttatggctgaattcaaaagcagatgtgtcggcatcaagacgggcagacagtgttcctttgcctgttaacagtggatcaaaggtaaagttgcctgcaactgcgggaataatggccagttcgctgcccgattcaatatcgacggaacccggaccgttccccccatcggtcagcacaagagcttccttcagagtgacaagtgaactgttcttcagcccgacatgttcgaaattctgtagttttacaacagaatccagcgtatgaatggcgttatcaaaaatcagggaatcagaatctccctgcccgccatccagcaggttccaggttgccccttcacctttaatggtgaaggtgttcttcccggtaccggcagtaacctgatcaacatgagtcttaccattgagtgttacattattattgccatttcctgcagtcacttctcctgtcagtgtgctgccatcatcaaataaaaatgtattgttaccctctttcgcactgacggttccggtaatactgcctttattggtgaatgtgttatcaccgccgttcagagccacaaccccctgaatttcagcaccgctgtcattcagtacggtggtattcacggcgtcatcaaacgccattgcagtcccggtggtggacgcagctttaatctgacctttattggtaaaggattgtgcttttgaagcatccactacggcatgactcagagaagcagagatgagattaccgctctgaaccacttcactggctgcattgttaaccaccagagcggaaccgccatcggcctgtataacattgacacttgcaccactcttcacgacagcaccatctttagtgttggcgaaaatacccgtgccgtccgtacccttcaggttaatgaccaatccagcggagtcagacatatccaggttattatcggtttcacttccgtcagctttctggaacgccagtgcaattccactgccgtctacattaatagtgccgctgttggtcttggccagggaggcagaagtacgtacaccaatgccatcagccacattaatttcagtcgtattggttaactgaatgccttcaatttctgcgcggttctcaatcccgtgaccgaccgcacctgcagcattaacattgattttcgcaccatcaataaccagccccacagcccctgtatccagcaggatgccatgcgcatttttctgaccttcgatcgtacccaagccactccctgccaggttcagtgacgcgcccgcccccagcttaatggcagcctcaccatccacagcgacgatatcccctcctgtgctggtaatctgagactgtgcaccttcaacaaataatgcaacgccattgaccgcaatacggcttcctgtattttcaaagcggccgttatcaacccagacgccgatattatctgtaccggtagtgaaatcaatgttgccgttgttaatcaacagtccctgattacgcgtaataaagcccttggcattattcagcggcgaagagatatctgcctcattggtaataaccgagccagtattcgtttgtgtaatactgccatccagagcgtattcatttccgtcaacttccgcgacaacagcgccatcccctacaaggttaactgatgccccctgtttcagcgtcgctgtcgcaccaccagttacatataatccctgagcctgagcgcccaggatctggaaatcactgccagcatcagccaggacattgctccctttccctgtggcccagataccacggctgcctgtcccggaggttttcatcagcagagagccggcctgttttgccccatcttcaatacggaaaagtacagaacgttccccactggcatccagcagagttcccggtgcaatattcgtcttaatggttgcaccatctccgataatacgaaaagcaatctgatcggtaataccagagccgtcagcagcaaagttcggtactgccgaaccatcaaggttaacagtccctttattgctggcctcaacgccaatcgccccctgtccctgcaaagatatagtacccgcggtcatattaaccgttgttgttgtaccagatgcttttatacccgttgtacggttagcattatctcctcccttgagaacgagatttcccgagttattaatcgttgtaacatcttgtgtggcattagcaattagtcccacaccaccatcctgaactgtaatatttccgctgttggtaccaacagccccctcctcaacccggacgcccactgtattctttccagtaaagatgatattaccggtattatttagagtggccccattacgggcgatatacccggtcactttatcctgggtggaacttaactgagcccccgccgttaatagtgtggtcttgtccttcggattaatgagtttgccggaaatatcatagccattgccatccgcaataccggctatcgcactggcattatccatattgataatggcattactttcaattgtgccctgcgctcccccttcaattaaagtcgctgtagccccctcacccgtcaggttgatggtcattcctccagacgttactgtcgaggccacaccgccatccgatttccccgtggcaataagtgcataagagttcttaccagacgccgtaagtgcagaagaagcatctgcagttccctggaatgtcgcaccactggcaatacggaataatgttgagttttcagtggacacatccataacaccgcttccggtattatgaatggcagagtcctttccatagacataaaagcctatctgatcgctgctgccaaatagcactgcaccattgcctgacagggtcagactgccgccatctttagcaaaaacccccacagcccccgtaccggcaagactgatttttccggatacattaacattgcttccggcaccttccacccaggcaccatagttacggaaaccactactgatacccttgccgccaacatttatcgtaccgtcagaattcaactgtcctgcattgattacctgtagcccggtgctgttcagaccattaacattgataatcccggagtttttcatcccggagctattatttgccagcatgccaacattcagtgcaggtgcatcactgtcatgaccgtcaatagtgatagtccctttatttaccacatcaacagtcccggcatcctttgccaggattccgtagttcccctgagcccccctgcccaaaaaaatagtaccttcattaacgactttgtttgcaccattttgtacttcaatcgcaacagaacccacagccgaatgagtcgcagttttatcctccgcaatacctacattgatgctcccgaaggccgagttaataaaagagcctccagctccaacatttacacctcgtgttttgccattattatcattagttgatgcatcggcagtaatatttattgtgcctttatttgttgccatgcccccattactaacaacaattgcggtgttaatcccctctggagcgaaagcatttttaaatgggcgaatattaataacaccattattaatggctgaagaaccattactaccggcaaccatcccctctgcctggagagcatatttatcattattatcccaaacaaaaagtgtaccatcgttaacaatggtactgtcttgataggcaatcatttcagtaccaatggcatcaatgaccccttcattaacaccggtcccaccattagttgcaacgatccctcctccattcccataggcaggaagaactccagttaatttacccgttttacctaatattgctcgtgcgttattggttgcatggagaacagcaagcagccctacattttctttgtaaggagttgagtctatacgtcccccagcggtcatatccacattgtaattatgcttggtgacaataagggccttattaaattcagcatcatactgcttataagaaagcgttttgtcctctagtgactttatcaaatattgattatattgctttaaatcatcaagagagttaatatggtgtacttttcccgcccaatcagtaattgttccagcatatttcattgagtcaatgattttttgagtaacgccgcccccctgcatggttgcaccaggctgaaaataaaaatcattgaccgagttccatacaacagaggaaccttctccatcagctacagcaagctgtgtatttttaaaaaaattaccgattgctggtgaacccacatccaaaatagctgtaccgccattattggctgttacaaaacgtgtcgcattgaaaaaatccgcagtgccactaaaaccaggaatggtttcatttcccccagtccccgcatcgcgttgtgagaaagagtcagtatcaaacacttgaagtgtttgagaagcgccagtaacctcatccttcactgtaatggtttttgttttttctccggtattgacgtaaatcaatccggataaattatctccagtggtgtagccatttaaaattgcctgttctacagtcatccagataagacctgacccaccagactggacgacatttggaccagtgatgtattcggttttaccacttactgttgcagccccaacacccgagttattcgtacccggacgccagtctggtgacaatatgacatctgccattgcgttattgcaattaattgcaatagcgccccccagaaccattgctgataaagcaattcctaagcgagttgatttacatttttttctacaactcgtcaattctgaaacaacatcccatttttgggttgtatggttccaaatgactttatatactttattcataacactaatactcttgaacgcacattataattgaatattttcactaataagggaacacggaatatttataaattgatgtaaacgttttaccccgagtttatccatagctctacgacgatgcgtccacacagtcttactggatatacccaaggtgttcgagatccatgcaatatcttttccttccttggtatatataaagatacttttctccctcggggataattgtcgttctaaaaaagaaactttatgattcgcgcgaatattttttttgcacctccagccattgataaatttatctatatagaaacaaaattgctctgctgttaatttccacggtatgaaaggtatgcctttattactaactacaccattatccccccatgccaggcacggaatattgacaggctggctttttagccattggtgaatgaaatacagtgagcgtatacaggtagtagaatcattatcagggaatacaggtaacaacaacgattgctcatcccgaaagcaagatgtgccaaaatcacgaatcagagaagaatagtcgtccacagcgatgactttcacgtacgaaaaaccccgccaacgcatactcttaattgcttgaattataaaagtattttttgtagtcgtaatcaaaaccatgcaatcaatttcctgttatcccctttcccaatttccttttgctttgcacaccggggggagacaaaccttgaggcacaggtttacaaaatgacccattttgacaacatcaatttaattaactacaaatagcacaaaacgcaggtaaaaaacctgcgtatttattttaattcagaatataattttgattgttatttacattttggctttatacgccagagattaaaaagaagacaaacctacctctttatgtgtagattgacgccgcacattgatctaaatcagtaaatttaatgttttttatagaaaaaaatgtttttctatacgagaatttctaaacaaagattgggtttacattttgggtcaaaatgttgcttttttgcgtcacctatcccccacattttttcaaatctcattgaattagaagcagtataaattaccgtatgcctgatattacgatgcccgagatagtcctgaataagacgggtatccacaccattatctgctagtgaataaccacatgcatggcgtaacatatgtggatgaactttaatatttaaacctgcatttttacccgcagcagaaactatgttataaaatcgttgtctcgataatggttttcctgttcgggaaacaaataaccacgggttatcattgaaatgtttaacatttaatgaattcctttcattcagccagtttgttattgcaatcacctcttccttttgaagtggatggactgtactgaatccattttttatccgttgaatatatattttttctgtagttagttctaaatccgacaactgcagagataagagctcactaacacgcagaccatgaaaataagccaataaaatcatgcaaacatcgcgtgaagagcaactcttttgttttacagattgaagtagtaaattaatttcatgatgcgttaaaaattttctgttttgcataaatcacctctatttatatgaaatagccatgtcaactatgatgaaagaattacatttagtcaataatataattcatatagttgctgtatgattatagattaatttattaaaattcacctaatctaattaatcgcttgtaaacgcatataaacaaccttcgttatgtaactatcgttcaaaactctcttgtaaatataaagagccctataagatgattataaaaaagtcctacaacccgaaatagcattccctcataaaattaagctcaacatcggcatatttaaaaagtatccaatgcaattaatattttatctaaaattaacattgtatcttgtatatattacatccatgaatgtatggatttttttatttaaaaattaatgcactataacaaaaaacatcaccaagtgttaaaactaacacaacaattaaccaaaataatatggctgtttatttttcatccgtaaacaaaaaggtacaaatattttcaccacaaaaaaaccaccagcatggcattgaattaccattcacaatacacacctcctttcgcttatttatgctcattggttgactaataatgatctataccccctgggcaactatctctctggcggggtattgatgaatatccatttagtggcataatttaaaccccagctcattatttgcttataaaaacaagcaataataccaggctctggtatttatagtttattttttaacttaattaatataaccgataatattatgcgcaaatttattactcatagtgaatggttgttattttttgaagccatcaacggttcaaaaaatgaaattagagataaagccatgttacaaatggcatatgtacatggtcttagggtaagcgagcttattgcactaaagattagcgacattgacttttcagagtcagcaatatatatcaagcgtttaaaaaatggattatccacagtacatcccctgcaaaaagaaactgttctgttattaaaaaaatggctagcactacgtgataacatagtaaaaaaaccttttgaagactctttgtttctttcttgtcaaggaaataaaatctcgagacaatatgtgtataagatgtgtaagaaatatagtcacaatatgaatattaatattcatcctcacatgcttaggcatggttgtgggtatgctttagctaatcaagggttagacaccagactaatacaagattatttagggcacagaaatatacatcatacggtattatatacagccagtaatgcagcaagatttaaacgagtatgggagggtgatgtgttagatataaagaagatataacccctgttctaaaggcctcaattcattgaggcttttagcccctcatttttatgacatacaactgataatcataatggatctcaatattaatcaaaatgagaaataaatcacctttttattaaaaaattaatttttttaaagtcacaaaccaacacatataatatttaataaaaatgccaccagcaaatatattgccacttatcttttctctggtaatctagtttactataaattatcgctctccaatattcgacgccaagaagaagtggttattttatttatccttttcgtaactattgacaaaacaattcccatataaaaattgcaatttataaagccaacatacacttacagtgcataataaggttatttaggaaccagatgatttaatgtattataaggtataacattcatattgacttacctgttctcttaaccaagtaataaatgcctcaatttttggccactgcctgcccggtaatgtggtgatgtaataatgctgatggcatttcaccgtcatatcgccaaacggcgcgacgagctcaccactggcaagccttttttgtaccatacgtttccttcccatcgccaccccaatatgattcatcgcggcgataacggctaaatcagagcgatcaaagccaattccagaagatgttggcaaattaaccgcataatgttgcgcccaactatgccattcatccgtaccggagtcgttgctccatgcctgtctgtcatggagcaacgtacagtgacgcaggttaattaccgtgttggttaaatcatgtctttgagcgtactccgggctgcaaactggcaagatttcttcatccatcagaaagtgatgagccaattgcgctgacggcgcatcatcaaagtagatcgccaaatcgattccggcacgttgcaaattgacattgtcattaccagtgagcacggtgagcgaaatagacggatatcggcgtgtaaagtcacctaatgcgggcaccaaccagcattgggcgatagagggccgggaatacagcgttaacgttcccgataactcctgatttttgatatccagaatttcctgattcagggtatccagcgacgattttagcgcccaataaacacgtttcccctcgtgcgttaattccactttgcgatgggaacgaacaaacaactgaatacctaattcttcttccagctgattgatacggtgacttaccgcactggggctcagcgacaattcctctgccgcgagagcgaaggactgatgcctggcagccacttcaaaagtatgcagttttgatagttgccagccgttaagcagtcgatttcttatttcacgaaggggttccataatcacctcatttttctcttaagtgtaaaaaaatagcggcaaaatttcagctgtaaggtgagctaaagtgaaccatatctcaattcaccttcatttttagatgtaaatcactcccttgatgcaatttagctcatgtgaaaggcaaattttatcgtttgtcagcctgcgttgtttttttgtccaatatcatcaggttaatcacaggggaaggtgagatatgcactctcaaatctgggttgtgagcacgctgcttatcagcatcgtgttaattgtactgaccatcgtgaagttcaaattccacccgtttctggcgctgttgctggccagcttcttcgtgggaacgatgatgggcatggggccactggatatggtaaatgctattgaaagtggaattggcggaacgctggggttcctcgctgcggttatcggccttggcacgatactgggaaaaatgatggaagtatccggggccgcagaaagaattggtctgacacttcaacgctgccggtggctttcagctgatgtcattatggtgctggttggcctgatttgcggcatcacgctgtttgttgaagtgggcgtcgtgctattgattcctctggctttttcaattgccaaaaaaaccaatacctcattgttaaagctggccattccgctgtgtaccgcattgatggcagtgcactgcgtggttcccccacatccggctgctttatatgttgccaataagctgggcgcagatatcggttcggtgatcgtctacggtttgctggttgggctgatggcatcactgatcggtggcccacttttccttaaatttctgggtcaacgactgccctttaaacctgtacccacagagtttgccgatctcaaagttcgcgatgaaaaaacactaccgtcattaggcgcaacgttattcaccgtactgctacccattgcgctgatgttggttaaaacgattgccgaattgaatatggcacgtgagagtggtttgtataccttgcttgagtttattggcaaccctatcactgccacgtttatcgccgtgtttgtcgcctattatgtgttgggtatacgtcagcatatgagcatggggacgatgctcacacatacggaaaatggtttcggttctattgctaatattttgctgattatcggggccggaggcgcattcaacgccattttaaaaagcagcagtctcgctgatacgctggcagttattctctccaatatgcatatgcacccgattcttctggcctggttggtggcacttattctgcatgctgcagtgggctccgctacggtggcaatgatgggggcaacggcaattgttgcacccatgctgccgctgtatcccgacatcagcccggaaattattgcgattgctatcggttccggtgcgattggctgcacgatcgttacggactcacttttctggctggtgaagcaatattgcggcgctacgctcaatgaaacatttaaatactatacgacagcgacatttatcgcttcagtcatcgctctggcgggcacattcctgctgtcatttatcatctaagcgcaaagagacgtactatggaaaacgctaaaatgaattcgctcatcgcccagtatccgttggtagaggatctggttgctcttaaagaaaccacctggtttaatcctggcacgacctcattggcagaaggtttaccttatgttggcctgaccgaacaggatgttcaggacgcccatgcgcgcctgtctcgttttgcgccgtatctggcaaaagcatttcctgaaacggctgccgcgggggggattattgaatcagaactggttgctattcctgctatgcaaaaacggctggaaaaggaatatcaacaaccgatcgccgggcaattgctactaaaaaaagacagccatttgccgatttccggctccataaaagcacgtggcgggatttatgaagtcctggcccatgctgaaaaactggctctggaagcgggtttgctgacacttgaggatgattacagcaaactgctttccccggagtttaaacagttctttagccaatacagtattgctgtgggatcaaccggaaatctggggttatcaattggtattatgagcgcccgcatcggctttaaagtaacggtgcatatgtctgctgatgcccgcgcctggaaaaaagcgaaactgcgcagtcatggcgttactgtcgtggaatacgagcaagattatggtgttgccgtcgaggaaggacgtaaagccgcgcagtctgacccgaactgtttctttattgatgacgaaaattcccgcacgttgttccttggatattccgtcgcaggccagcgtcttaaggcgcaatttgctcagcaaggtcgcatcgtcgatgctgataaccctctgtttgtctatctgccgtgtggtgttggcggtggtcctggtggcgtcgcattcggacttaaactggcgtttggcgatcatgttcactgcttttttgccgaaccaacacactccccgtgtatgttattaggcgtccataccggattacacgatcagatttctgttcaggatattggcatcgacaaccttaccgctgccgatggccttgcagttggtcgcgcatcgggctttgtcgggcgggcaatggagcgtctgctggatggtttctatacccttagcgatcaaaccatgtatgacatgcttggctggctggcgcaggaagaaggtattcgtcttgaaccatcggcactggcgggtatggccgggtctcagcgcgtgtgcgcatcagtaagttaccaacagatgcacggtttcagcgccgaacaactgcgtaatgccactcatctggtgtgggcgacgggaggtggaatggtgccggaagaagagatgaatcaatatctggcaaaaggccgttaataacgtttcaacgcagcatcgccatcctttccctgggtgagcgatgctgccgatgacgcagacttaagattctgccgttttacctgctatagcctcctctttttccatcacccaacgcctttcgctgtaaacggcggtttcgcaaaccaaaccaaaaccgtaagtaagataaaagcaatagccgccatacggaaaatctcatttgcagaaatagaaagtgactgctgagttatttcattattaatttcattaagaactcctgaaagcgaaccatagtatttatccataatttgtgacgatgaattaaacacggggttaaattgatcgatggttgctgtcaactgactatggtgtaacgattcgcggcgtccccacagtgtcattgtcaacgacgtaccaactgatcctgacaaggtgcgaaaaaaattactcatactcgaggcattggcaaatttattatctggcaagcctgaaaacgaaatcgttgttaagggtaaaaagaaacaggcaacggcgaatccctgaaaaaactgtggcaaaatgatgcctgtaaaatcaatcgttggcataaatgtcacagaacgccagtaatagcaaaccgcatacatcaaaaaactaaatgtcaccaacaaccgcatatcaattttgttgccataacgtcctatcaaaggtgatattaatagcggcatgataccgatgggcgcataggcaagtccggcccatatcgcattataccccatcgtttcctggagtaactgcggcataagaactatcgctccagagtaaaataaatacgcgcatgtgatactcacaataccaatggtgaaattacgggacttaaacaaactgaggtcaagaatcggattctctgaggtcgactcccaaatgactaaagagatcagagaaataactgatactactgttagtagtattattgtactcgagttgaaccaatccagatcgcgccctttatcaagcataatttgcaagccaccaacaccgagcactaacagggtcagtcctggtagattcattttgaccggtgaagtctcagtttctcttcctttaagtaaggttaagcataatgtcaggacgataatccccatagggacattgattaaaaatatccaaccccagctaaagttatcgcaaatatagccgcccaatatcggcccacatatcggagcgataatcacggtcattgaccataatgccagagcaaatgttcttttttctggtggataattccttaataataaactctgtgacagtggaattaacggccccgccattaacccctgaacgactctaaaaaatatcagcacatctagattggtcgataaactacacattaatgaagacagcgaaaaaaaggttactgaaagtaaaaataaccttaattcgcctattctttgtgccagcctgccggtaacagggatcgcaatggcatttgctacgccaaacgaggtgataacccaggtgccttcgtctgttgatgctcccagaaagccagatattgtcggtattgcgacgttagaaatagtggaatccaacatttgcataaacgtcgctaatgacaatgcaatagtgacgcaccataacgtcccaccggttaatggtgcaggagttgatttagtgattgccattaaagttgtccattatgcgaaataatgttgctaatttctttttctatcggactggtatcgataactaaagccttactggtataagcaggcatggacgtcacggttgaagccagatcgggcatctcggcaatgtcttcattcttcgtatcaatagttgcagtcatcgataaaccaatgcgcaaagggtgttccatgagttcttttggatccagagaaacttcaaccggtacacgctgaacgattttgatccagttccctgtcgcattttgtgcaggtaataaggagaacgcattgccggttcccatattgatccctgtcacccgaccatgaaacacaacattttcaccataaagatcgctgataatattgaccgattgaccaatccgtacatccgtgagttgtgtttctttaaagttggcattaacccacatttgacgcgccggtacgacagccattaacgattgtccgggactcactgtttcgccgacctgaacacttctctgggcaatataaccggtaaccggactcttaatatccgtacgtttaagcgccaaccaggcttctttggttgcatctgcagcttcaatgacttgtggctgacggtttaatggtgtgttcattactaaagctttattcgctttataagcctggatagcagcattcaatgccgctttgctacttattaacgtatctttggtatgctccagcgcttcttttgaaataaccccttgcttcgctaaaggcacacgacggttataatcttctaaagattgttgatactgaatacgtgctgaagcgacttcggcactgtattgtttatcctgtaagtatagtttattcgtttgccgaacaatatttgccagattatttttagctttattgagtgcgatagtggcatcagttttatccagtgaaactaaaatgtcaccttgtcgaacgtagttcgtatctttatgattaacgacagtgacactgcctgagacttgtgcagaaattggatctgcatttcccgtgacataggcgtcatctgtactaatcatgtcttttaattccattgaccaataggcataggcacctgaaaacgcaataaataaaactaccgctaacaaagcaaaatattttcttctgtcagaatgttttttatttgaattaatctgttccactattatctctcatttcgcatagatgaaatttatgaattgaatgaaaagagtattcattcctcatatcaaacacagtgcatgttttgcacattatcccgggaacgttggagggctaatttaaatgaagtgcaaaaaaaacaacagaggactaaaccgcggcttttgcaatacaattcttacgcctgtaggattagtgagaaaacttatagtgctcatttgaaactataaatcatcggtatcatccctgattttattgttgacattttatttatgccgactatttatatggtatacttgtcgaattatcttaaaggaagctcaaattttcttatttttattgagaaaatgagatgataccttatgtctgtattactacaaggagaagggaaatgcttcattgcaaagggaataatctatgaacgcaataattattgatgaccatcctcttgctatcgcagcaattcgtaatttattgatcaaaaacgatattgaaatcttagcagagttgactgaaggcggaagcgccgttcagcgggtggaaacacttaagcctgatatcgtcatcattgatgtcgatatccccggagttaacggtatccaggtgttagaaacgctgagaaagcgccaatatagcggaattattattattgtctccgctaaaaatgaccatttttacgggaaacattgtgctgatgctggcgctaatggtttcgtgagtaaaaaagaaggcatgaacaatatcattgcggctattgaagctgcaaaaaatggctactgctatttccccttctctctcaaccggtttgttggaagtttaacgtccgaccagcaaaaactcgactccttatcaaaacaagaaattagtgtcatgcggtatattcttgatggcaaggataataatgacattgctgaaaaaatgttcatcagcaacaaaactgtcagcacttataaaagtcgcttgatggaaaaattagaatgcaaatcactgatggatctttacacattcgcacaacgtaacaaaatcggctaaccacatgaagtttttaccctatatttttcttctctgttgtggtctttggtcgaccataagcttcgcagacggagattacatcgaatatcgtggcatcagtagtaacaaccgtgtcacacttgatccactacgtctgagcaacaaggaattacgttggctcgcgagcaaaaaaaatcttgtgattgcagtacacaagtcccaaacagctacgttgttgcataccgattcgcagcaacggattcgtggtattaatgctgattatttaaatcttttaaaaagagcgttaaatatcaaattaacactccgggaatacgcagatcatcaaaaagcaatggacgcgctggaagacggtgaagttgatatagtgttatcacatttagttgcttcgccgcctcttaatgatgacattgctgcaactaatcctctgataattacctttccggcgctggtcactacccttcacgattcaatgcgaccgcttacctcatcaaaaccagtaaatattgctcgagtagcaaattatcccccagacgaggtaattcatcaatcatttccaaaagcaacaattatctcttttacaaatttatatcaggcattagcatccgtctcagccggacagaatgattactttattggtagtaacatcattaccagcagtatgatttcccgttattttactcactccttaaatgtagtgaagtattataactcaccgcgtcaatataactttttattaaccagaaaagattcaatcgttcttaatgaagtactcaatcgatttgttgatgctttaacaaatgaagttcgctatgaagtatcacaaaattggcttgatacaggaaacctggcctttctgaacaaaccattagaactcactgaacatgaaaaacagtggattaagcagcatcccgatttaaaggtgctggaaaatccttactcgccaccctattctatgacagatgaaactggctcagttcggggcgtgatgggtgatattcttaatattattaccttgcaaacaggtttaaatttttctccgatcaccgtttcacataatattcatgctgggacacagcttaaccccggtggatgggatatattgcccgccgctatttatagtgaagatcgagaaaataatgtttcatttgctgaagtcttcataacaacgccttacgtttttgtcatgcaaaaagcgcctgacagtgaacaaacattaaaaaaaggaatgaaagttgccattccatattattatgagcttcattcgcaattaaaagagatgtatccggaggtagagtggataaaagtcgataacgccagcgctgcatttcacaaggtcaaggaaggtgaacttgatgctctggtcgcgacacagttaaattcgcgttacatgatcgaccattactatcctaatgaactttatcattttcttattcccggcgttcagaatgcatcactttcgtttgcttttcctcgcggagaaccggaacttaaggatattattaataaagcactgaatgcaattcccccaagcgaagttctgcgcctgaccgaaaaatggattaaaatgcccaatgtgaccattgacacatgggacctctatagcgagcaattttatattgttacgacattatccgttttattagttggcagtagccttttatggggattctacctgttacgctcagttcgtcgtcgtaaagttattcagggtgatttagaaaaccaaatatcattccggaaagcgctctcggattccttaccgaatccaacttatgttgtaaactggcaaggtaatgtcattagtcacaatagtgcatttgaacattatttcactgctgattactataaaaatgcaatgttaccattagaaaatagtgaatccccctttaaagatgttttttctaatacgcatgaagtcacagcagaaacgaaagaaaaccgaacaatatacacacaggtatttgaaattgataatggcatcgagaaaagatgcattaatcactggcataccttatgtaatctgccagcaagcgaacatgctgtttatatttgtggttggcaagatattaccgagacgcgtgatttaattcatgcactcgaagtagagagaaataaagcgatcaatgcaactgtcgcaaaaagccagtttctggcaacaatgagtcacgaaataagaacaccaataagctccattatgggcttcctggaactactgtcgggttctggtcttagcaaggaacaacgggtggaggcgatttcacttgcctacgccaccggacaatcactcctcggcttaattggtgaaatccttgatgtcgacaaaattgaatcgggtaactatcaacttcaaccacaatgggtcgatatccctactttagtccagaacacttgtcactctttcgctgcgattgctgcaagcaaatcgatcgcattaagttgcagcagtacgcttcctgaacgctacctggttaagatcgaccctcaggcatttaagcaggtcttatctaatttactgagtaatgctctcaaatttactaccgagggggcagtaaaaattacgacctccctgggtcacattgatgacaaccacgctgttatcaaaatgacgattatggattctggaagtggattatcgcaggaagaacaacaacaactgtttaaacgctatagccaaacaagtgcaggtcgtcagcaaacaggttctggtttaggcttaatgatctgcaaagaattaattaaaaacatgcagggcgatttgtcattagaaagtcatccaggcataggaacgatatttacgatcacaatcccggtagaaattacccaacaagtggcggctgtcgaggcaaaagcagaacaacctataacactacctgaaaagttgagcatattaatcgcggatgatcatccgaccaataggctattactcaaacgccagctaaatctattaggatatgatgttgatgaagccactgatggtgtgcaagcgctacacaaagtcagtatgcaacattatgatctgcttattactgacgttaatatgccgaatatggatggttttgagttgactcgcaaactccgtgagcaaaattcttccttacccatctgggggcttacagccaacgcacaggctaacgaacgtgaaaaagggttaaattgcggcatgaacttatgtttgttcaaaccgttgactctggatgtactgaaaacacatttaagtcagttacaccaggttgcgcatattgcacctcagtatcgccaccttgatatcgaggccctgaagaataatacggcgaatgatctacaactgatgcaggagattctcatgactttccagcatgaaacgcataaagatctacccgctgcgtttcatgcactagaagctggcgataacagaactttccatcagtgtattcatcgcatccacggtgcggctaacatcctgaatttgcaaaagttgattaatattagccaccagttagaaataacacctgtttcagatgacagtaagcctgaaattcttcagttgctgaactctgtaaaagaacacattgcagagctggaccaggagattactgttttctgtcagcaaaatgactaaatagcggctcccacaatgttcaaatgtgggagctatttaccagcacatcttacatttatgatgagaactcctggcgaatttgttccccatgctggtcgagcgttgccgctcccggcataacatgcgggtccgcgcagccgctgatttttatcggattacccggcatcattattcccccggcttcaatcaacatatttctcgcctgagtttgtggtaaattaatggcctcagccacacttaataacggcgcgacgggcacaccaacttcatgtattctggctaaccaaacttcagctacctgcgtttttaacgtccgctcaatatattctttaagaatagcctggttatgtacgcgtaaaatattgctgctaaatcggggatcattaaccagttccgtaagctccagtgcctggcataacgcagaaaaaagcttgtcattaccacaacaaatcgtaatcggcttatcctgagtatcgaaaacatcaaaaggtgccatgtagggatggcgatttcccaggcgttgtggtgacttcccagtcgcgatatatgccatcagtccatgctccagaaaactcagagtggcatcaaacatcgctatatcgacatgcgcccctctctggctcttttcgcggccataaagtgcactcactattccactgaataaataaacaccgccacagagatccgcaagagaggtaccaacgcgcactggcggagcatcagggtatcctgtttccatcattatcccgctcattgcctgaatgatggtatcgtaggcaggagcatcttttagcggaccggtatgtccgaaacctgacgatgaagcatatataaggcgcgggttgatttcttgtaacctttcccatgaaaacccgagtttttccattgtacctgggcgaaaattctcagctaatacatcagcttgtttaagcatatttataaatatacttttatcgtgatcattctttaaatcaagaaccacactctcttttccatgattaataaaactgtaatagagcgactgtccatccacatagggaccaaatgtgcgggtatcatcaccatgacccggcggctcaactttaattacccttgcacccatattacaaagaagttgagttccgaaaggcccattaaggacatgcgtcatatcgataactaataagccttcaaacggccctttgcattcattatttgtcatttgcttatgccttgaaaaaagccgaaggtgaaaagacacttcggcatttatgtaaaatcaataacatgattaattatgaaaccagtcgactgacataaatccacaaaggagccgtgacgacaaaacccagtacgctcacagccaatgacgctgtaccagtgcgggtgtagacattaaaccggctggcaataatgattccggagaatgccggcggtaatgcgcctgccagtaccatcatctgcaaatgttcgctattcaaatgacatgccatacctacgagaagcagcgccagtggcatcagaatcagcttcaggaaggtgttataagcaatttcggcactgaactcgaatttatgtgcagccagagtcaaccccgcagcgaataccgccacccctgagttagccttcgcaatcagattaaaggttgggtcccatgctgccggaatttttaccccaaccaacaccaggatcgttgccagaacaggtgcccatactactggctcctttgccgcagaaattaatgcgctcagattactattcttcttaccatccgctcctgaggaaggattcagcaaatacagaccaataggaatagtaattgcgttaacaataatagaaataattgctaccactaaacctgttgatacggaatcaccataaataggatcgagaactgcaaaccccaggaatccaatggtaggtgaacctgcaattaatgcacatactgctgcttctgcatgggtacgtttaaaaaatttgtagcaaccgaaccaggagaaaaagaaacatccgacaataaccacaagtgatacaagggtcaggcgagtgtccgcaaaaatcatttccctgtttgcccgggtaatagaaacaaatagagccgcaggaagagcgtagtttaataccagtttattaaatgcccgagcttgatcctctgaaaaagtttctcgtctgccgctaaaataacccaacagcatgattacgataataggcaataaatcgccaataaaaaatgttagcataatagtatttccgataagggtccccttaccatcgcataataagttggcaagaggagacgatgtcagtatttaattaccagcgacttgttttgggttaagtttggtaatatggccactttcagttcctgctgctgggtcgatgaccacattaataatggtcggtttgcgcgactgaattccggtggttaaagcatgacgaagttcatctgtcgtggtgacgttatagccaacgccacgaaacgcatccattaatttgtcataccttgcatggtgcaacagatccgttggcgatggtgcaccagcgccgctgaggtcaacaccgtctcctctgtagatgccgccattattaaaaataacgatcgtcaccggcaggttatatcgacaaatcgtttcaatctccatcccactgaaaccaaaagcactatcaccttcaatggcgacaaccggagaaccagaggtcacgctagcaccgatggcatagcccataccgatgcccatgacaccccaggtgccacaatccagacgacgacgtggtttatacatatcaataatatttcgtgcattatccagggtatttgccccttcattaactaaataaatatcctggttctcgcgcaaaacatcgcgcacggcacccaatgcattaaagtaatttaatggttgggtatctgtacttaacttttcatgcattttttgtgcattttgctgcttgtggatatttaaaatatcgcgccacaccagtggagtcgtgaatgtgttttgtttcaattctgccagcataccttgcatactggatgcaatatcgccaacgactggcacagcaatggggcggttgctgtcaatttcctgcggttcaatatccagttgaataaactgtgtatctgccgcccatccttttttaccgtgtgccagtaaccaattcagtcgtgcaccaacaagcatgacaacgtcagcatttgccagggcaaacgaacgcgcagctgccgcagaaagtggatgcgtatcttcgaggatccctttcgccatagacattggcaggaatggaatctgggcactttcaataaattcacgaagctgttcatcagattgtgaatacgccgcgcctttgccaagaataattaatggtcgttcagcttttgctaaaagcgaaattgcgctagtgactgacttcgggcatggcaataatgctggcgacggattttcaactttaacaatcgtggttaacgcttcgtctttttccatcgtcgcggccaggacatttgctggcaaatcaagataaacaccgccaggacgacccgatactgagacccggatagcgcgtgccaatgcaatgccaagatcctgcggctgattaacgcgaaatgctgctttggcatacggttttgccgcattcatttggtccagctcttcataatcaccttgctgtaggtcgacgatcgcgcggtcgctggagccgctaatcatgatcatcggaaaaccatttaccgttgcattggccaatgcggtcaaaccgttgaggaatcctggcgcagacactgtcaggcagatccctggtttttgggtaagaaaaccgcttgctgcagcggcatagcctgccgactgctcatgacgaaaaccaatataacgaatgccttccgcctgggcatggcgcgccatatccgtcacaggaatacctacaacaccataaatagtgtcaatattattctgttttaatgcttcaacgatgatatgcataccatctgtcatttgaagttgatctgacatgattaataacctcgaaatttttataaattgggagccagaagcccccgttaatatcagatggcgtggttttgcttcattgcagcaatttcatcgtcgctataacccagctcctgcaatacagcagcggtatgttcacctaatagcggcgcagctttaatatccggcgtaaaggcagagaatttcattggacaaccaactgtcagatattttccacgcaacggttgttccacttcgacaacactgccactttggcgcaaagagggatcaagtgaaatttctttcatacttaaaaccggtgcacaaggaatatcaaactgagtcaaataggccaccgcttcatgtttatcaatagtgacagtgtatttttcgatttcagcaaaaatatcgaaaatatgtggctgtcgggcatgggctgtactgtatgccggatcggtaatccattctggtttgccgatggctttacaggtgttttcccagttttgctcctgaatagtgaaataaatataggcgttaggatcggtttcccagcctttacatttcaggatccagccaggctgaccgccaccacccgcattaccaccgcggggaactgcatcaccaaatgtgccattcggatactgcgggtattcttccagataccccaacttatcgagacgctgctggtcgcgtaatttcacgcggcaaaggttcaacacggcatcctgcattgacatggtgactcgttgcccacgccccgttttttcgcgatgcagcaaagcagcaagtaaaccgatcagcaaatgcattccggtgttgctgtcacccaacgctgcagcgcttaccagcggcggaccgtcccaaaaacctgtagtagatgccgcgccacccgctgcctgagcaacgttttcataggcttttacattcacataaggcgaacactcatcaaaccctttgatcgaaccaaaaatcagacgtggattgatttcttgaatatgctcccaggtgaagcccatatgatcaatggcccctggatgaaagttctcgactaagatatcagcttcgcggatcagcttttccattacctctttgccttccgctgttttggtatttaattcaatagaacgtttgttactgttaagcatggtgaagtaaagcgcatcgatatcaggaatatctcgcagctggtggcgcgttacgtcaccaacgctgggacgttcaattttaatgacgtcagcgccaaaccaggccagcatttgagtacaagatgggccagattgcacaccggtgaaatcgagaactttaattccttgaagtggagttgacatagcaatacctattagttaattaaatatgtgttaatttagcgtttatttaaggcataacgcctctataaataatctgcaaaatatcgtcgtagctgcactcgatatttttaaattcctgtatcaagtgctgaaaatcatttcatcgctacttccaattcctttctgcatggtaagtagtgaggacgaaaagaagaatataataaatattggttcgcggtaatcagagagagccgcgacatttgtgatgttattcttacaactgtaagaagtgtcagtgatttacaagtaaggttatgattacactatttaaagcgtaccataaaatataacataataaatgatttgtgataatatgggattattgcggtttactttgaggaagataaaatgcgagtttatagaaccgcgagcgccaaataattttatgaccacaacctgtcgtattgtggtcataaaaaattgtcgactggagggagttaaatcctttacctcaatatattgcctgtcaggtttagttcacaaacagtgcttcgctatcaacgatgattccatcttccgcacctttaagcgccaggtttgcctcgtagtattgctttttatcaagcagtttctgcgcatcagcaagtgcattacgagtctgtttaagcggcatcaaatattggttttccattacaccaacaccggccaggcgaagctcttccattgcaccctttttatcccctttcgccattttttcgttggcaatttttatcgcggcttctttttcgggtgtcgctacataactttcagaaattccgacagatgcattaatgacaatatattggtcatcattgacgttggtctttttacctggcttagcgaactttgcccattcggtactatcatctgacagcaaagcggaagcttcattggtcagttcttttgccttttccggatcgccatgaaacagagccaggcgcgctacctgcacgtcacgcatcgcatataaaccttgttcagagatacgctctgctgctgccgttttctgggtttgcttaacttgctgagtttgctgttgtgccgctaccggtgcattatcagcagcccatacagttgaagatgccagaattgctgtgaccatcgtagccataattaaacgtttcatacttacctcattctttaacagttttagaaaacgccgccatcatattgggtgagaatgaaatgagaaatcagagagcaacggacattttgaaagggttatcttacaactgtagttattatcgcaaagccgcttttagtcttacagttgtaggaatctgcttcctgtcgcagagaactattcttatataccacaaagatatgtcatttattatatcgatgtaaatactgattaattaaatataaatacagccataacatcgtaggttttcagtgaaccattttcaggatattttctatgaaagtaaacttaatgctttttagcttatttttatttgtctctattatggcatgcaatgtttttgcattttctatttctggtggtggtagtgaggcgagctataaagagacagaaaaaacgtcagtgatgacgacaacgcattctacaaaacttcagccatcacaggcgattttgtttaagatgagagaagatgcaccaccattaaacctcacagaagacatcacgcctacttatccgacaaaggcgaattatctcattcatcctttgcgatagcgtctgtcacctggcaggtgaacaatcatgtctgatgctgatgtgaacacctgcccaaatgagccatcctgacccactatcgcctgccataccccaccataaagcgaatcatcaagccacaagccggggcaagaaacataaatatccccgtcaccagttcattaccgccagttaaccacatggtgaagtaataaatgagtgcagcgaggatcaccatgccgaagaaagaagagatcgccgataccatgttcagtacctgaccgatgtatccgcttacgcagacaatacacagggcgagaaacatccataaataaatcatagctcaacctcctgccgcgctaaaaaacctgtaacttcagtcactttaatagtaagacaatccttaacctctggcaatttttgctaagcatcaatgaaaacagcatgttaaatgcaagactgttgtgtacggaaaaatatttactttgcacgattaataatcagtagctgaaagcagtcagcgagtgataaagtacagataccgcattcatgctcctcgtggttatgtcctgactagtctttacactctttacaggaaccattgtcgtacatgatggcctaatcaattgagtgtaccgctgtcgacatggaatcttctgcgatacaacaattcgtatctacagaaggtaactatgtttccaaaatgcaaattttcccgcgagtttctgcatcctcgctactggctcacgtggtttgggcttggtgtactctggctttgggtacagcttccttatcctgttctctgctttctcggcacgcgtatcggcacaatggcgcgaccattcctgaaacgtcgtgaatctatcgcccgtaaaaacctggaactttgtttcccgcagcattctgcgaaagagcgcgagaagatgattgccgaaaactttcgttcactcggcatggcgctggtagaaaccggcatggcgtggttctggcccgacagtcgcgtacgtaaatggtttgatgtggaagggctggataaccttaaacgcgcacaaatgcaaaatcgcggcgtaatggttgtcggcgtccattttatgtcgctggaactgggcggtcgggtgatgggactttgccaaccaatgatggccacctatcgcccgcataataatcagctgatggaatgggtgcagacccgtggtcgcatgcgctctaacaaagcgatgatcggcagaaataatctgcgcggcattgtcagtgcactgaagaaaggtgaagcggtatggtttgctcccgatcaggattatggtcgtaaaggcagctccttcgcgccgttctttgcggtggaaaatgtcgccacaaccaatggcacctatgtcctctctcgtctctctggcgcagccatgttgaccgtaacgatggtaagaaaagcggattacagcggatatcgtttgtacatcaccccagagatggaaggctacccgacagatgaaaatcaagccgctgcctatatgaacaagattatcgagaaagagatcatgcgcgcaccggagcagtacctctggatccaccgtcgctttaaaacgcgcccggtgggtgaatcgtcgttatacatttaacaaacggctctcactctttccctcctcaaatcagccataataacctcatggtttttatggcttttttcttaaggttttttccttcgctgaatatctaattattaccgtcagaaattaaactgtcgccgatatgagacacctgtaagttactaaaagtaaataagaaaatgcctcttgtctcgtttcagttttaggcgtacattagcgccgtctcgagcagtttagctcagaattctgggatgatgcccacggtaaaatacaggacgtttaaggtcgttttgcccggtgtcaactcactgtatcaggtgtaataaagtcattcaggcgtaacagtagttacgcggagagatgtaaagtgaaatatttctttatgggcatttcttttatggtcatcgtttgggccggtacttttgccctgatgatctaaaagcaaactgtgcaatgaaaaacaggagccatctggctcctgtttgcatttctgacgatggtgtttattccgcgttttcgtgaatatgtttgctgctggcaggtagtaaaccgtcggcacggaacatcgctttaatcccacgaatcgcctgacgaatacggtcgcggttttcaatcagtgcaaagcgcacatgcgtatcgccgtagtcgccaaagccaatccctggagagacacagaccttcgcttcgttaagcaatttcttggcaaattccagcgagcccatggcagcatacggttccgggattttcgcccagacatacatcgaagccttcggcatttcgaccatccagcccgcttcatgcagccctttcaccagcacatcacggcggcgtttgtactgttcggcaatatcgcgcacgcactgttgatcgccctccagcgccgcaatagccgccacctgcaacggcgtaaaggtgccgtaatcgtgatagcttttaatacgtgccaacgcgctgaccagcgttttgttaccgaccataaagccgatacgccagcccgccatgttgtagcttttcgacagcgtaaagaactcgaccgccatgtcgcgtgcacctggcacctgcatgattgacggcgctttccagccatcgtagacgatatcggcataggccaggtcgtggaccaccagcacatcgtagcgtttcgccagcgccacaaccttctcaaagaattccagttccacgcattgcgcggttgggtttgacgggaagccgaggatcatcatcttcggtttcggataactttcacgaatggcgcgctccagttcgttgaagaaatcgacaccttccaccagcggcactgagcgtacctgcgccccggcaatcaccgcgccgtaaatatgaatggggtagcttggattcggcaccagcactgtgtcaccatgatccagcgtcgccagcatcagatgcgccaggccctctttcgaaccaatagtgacgatggcttctgattccgggtcgatttcaacgtcgtagcgatcctgataccagcgggaaatggcgcgacgtaaccgcggaatgccgcgtgaagtggagtaaccatgcgtgtccgggcgctgggccaccgtacataatttttcgacgatatgcggcggagtcgcaccgtccgggttacccatactgaaatcgataatatcttcgccgcgccgacgcgcagccattttcagttcagcggtaatgttaaaaacgtagggcgggagacgatcaatgcgcgtaaagcgacgttcagggcgagtgtcagccataatttcctcagattaacgttagcgcccggaccgtccgagcgacgctgccacgatggtggctgttttgaaaatagcctgattaatttctgtctgtccagcgttttagaacatttttatcaatggctttaaatgaggaactccacttcaaaaacaggaaatttatctacgctaacaagaaaattaccattcattttattaacattataatttcaataaatttaccaaccagatgtgcattatcaagagatgcattgctaatacaccatttatctttcaatccccttttaaaattgtggtttttcctcaaaaacggcctgctggtcatcagccttcaggttacctatcatagaggtttaatccttattcagagtcacccgtgcacgaaatattcaacatgctgctggcggtcttcgatcgggcagcgttaatgcttatctgcctgttttttctcatccgtatccgcctgtttcgcgaactgttgcacaagtcggcacactcaccgaaagagctgctcgccgttaccgccattttctcgctgttcgccctgttcagcacctggtccggcgttcccgtagaaggctcgctggtgaacgtacgtattatcgcggtgatgtcaggcggaattctgtttggcccgtgggtgggcatcattaccggcgtgattgcgggtattcaccgttatttaattgacatcggcggcgtgacggcgatcccctgctttatcaccagcattctggcgggttgtatatcgggctggatcaacctgaaaatccccaaagcacagcgctggcgcgtcggtattctcggcggcatgttgtgtgaaacgttgaccatgattctggtgattgtctgggcaccaactaccgcattggggatcgatatcgtctctaaaatcgggattccaatgatcctcggtagcgtctgtatcggctttattgtgctgctggtgcaaagcgttgagggcgaaaaagaggccagcgccgcgcggcaggccaagctggcgctggatatcgccaacaaaacgctaccgctgtttcgccatgtcaatagcgagtcattacgcaaagtttgtgaaattattcgcgatgatattcacgccgatgcggtggcgatgactaatactgatcatgtgctggcctatgtcggcgtgggtgaacacaactatcagaatggcgatgacttcattagcccgactacccgacaggcgatgaattacggaaaaatcatcattaaaaacaatgatgaagcccaccgcacaccagagattcattccatgctggtgatcccattgtgggagaaaggcgttgtgaccggaacgctgaaaatttactactgccacgcgcatcagataacctcgtcattacaggaaatggcggtcggtctgtcacaaatcatctccacgcaactggaggtgtcacgcgccgagcagctgcgtgaaatggcaaataaggcagagcttcgcgccctgcaaagcaaaattaatccccatttcctgtttaacgctttgaacgctatttcatcgtcaatccgcctgaatccggatactgctcgccagctgatctttaatctgtcgcgttatctgcgctataacattgaattaaaagatgatgagcaaatcgatatcaaaaaagagctgtatcaaattaaagactatattgccattgagcaggcccgctttggcgacaagctgacggttatctatgatattgatgaagaggtgaattgctgcattcccagcctgctgatccagccgttggtggaaaacgccattgtccacggtatccagccttgcaaaggtaaaggcgttgtcaccatcagcgttgcagagtgcggtaatcgggtacgtattgcggtgcgagataccgggcacggcatcgatccaaaggtgattgagcgggtcgaagcgaacgaaatgccgggcaataaaattggcctgctgaatgtccatcatcgcgtgaagttattgtatggcgaggggctgcatatccgccgcctggaaccaggaacggaaattgcgttttacattcctaaccaacgcaccccagtcgcctcacaggctaccttattgctttgagccggagtgatattgtgaaagtcatcattgttgaagacgaattcctggcacaacaggaactgagctggttaattaaagagcacagccagatggagattgtcggcacctttgacgacggtctggacgtgttgaagtttttgcagcataaccgcgtcgacgccatttttctggatatcaatattccgtcgctggacggtgtgttgctggcgcaaaacatcagccagttcgcccataaaccgtttattgtattcatcaccgcgtggaaagaacatgcggtggaagcatttgaactggaagcgtttgactacattctcaaaccgtatcaggagtcacgcattaccgggatgctgcaaaaactggaagcagcctggcaacaacagcagaccagcagtacgacacctgccgcgacggtaacgcgtgagaatgacaccattaatctggtgaaagatgagcgaatcatcgtcacgccaattaacgatatctattacgccgaagcgcacgagaaaatgacctttgtctatacgcggcgtgaatcctacgtaatgccgatgaacattaccgagtttttcagcaagctgccgccgtcgcattttttccgctgccatcgctcattttgtgtcaatctgaacaaaatacgcgaaatcgaaccgtggtttaataacacctacattctgcggctgaaagatctggattttgaagtgccggtcagccgcagcaaagttaaagaattccgccagttaatgcatctgtaatcgggaactttcatgaaagcaccaggcttgcccgccgatcaacaatttttcgccgatctgttcagcggcctggtgcttaacccgcaactccttgggcgcgtctggtttgccagccagcccgcctcattgccagtgggcagtttatgtattgattttccccgtctggatatcgtgctacgcggcgaatacggcaatctgctggaagcaaagcagcaacgtatggtggaaggagaaatgctgtttattccagcacgcgcggctaatttaccggtcaacaacaaaccggtgatgctgttaagcctggtgttcgcaccgacctggcttgggttatcgttttacgatagccgcaccacgtcgttgttacatcctgctcgccagatccagcttcccagcctgcaacgcggtgaaggtgaagcgatgcttaccgccctcacccatcttagccgttcgccactggagcagaatatcattcagccgctggtgttaagtttgctgcatctttgccgtaacgtggtgaatatgccgccgggcaattcgcaaccgcgcggcgattttctctatcacagcatttgtaactggattcaggataattatgcccagccgctcacccgcgagagcgtggcgcagttttttaatatcacgccaaatcatctgtcaaaactgtttgctcagcatggaacaatgcgttttatcgaatatgtgcgttgggtacgaatggcaaaagcgaggatgattttgcaaaaatatcatctgtcgattcatgaagtggcgcagcgttgcgggtttccggatagcgactatttttgtcgcgttttccggcgtcagtttggtctgacgccgggagagtatagcgcacgttttcagggctaacttcagaaggttaattccgtttccagcagcgtcagaatactttgtgcatcttgcgcggcaaacagcgactggcggaagtttttattcaccagtttacgcgccagctgcgagaagactttcacatgattcatcccttcgttagcgcccagcgtcagcatgatcaccagttcgacttcgcccatttctgactgccagtcaaccggtttcaccaaccgggcaatgctgatactggaatgacggatccactgtgatttggtgtgcgggatcgccacgccaaaaccaacgccagtagtaacaatctcttcccgctgccagacatcttcttccagctcgaacggatgttcagtacgcccgttaacaccgaggttaccgcacaggaactggatcgcctgctctttattactaaaggactgatcaacaaagatattctctagtgccagcagtgggcgaacgtcttcttccggcgtaaacgcggtaagtaacgcttcaatttcctgcgcgctgcggcactcgcacgcctgacgcgccagttcccgacacgcctcgctatccagttgacgaagctggcttttcactgccggaatacgcgggctactcatgcttagctcatccaggcccagccctagcagtagcggcagataacgactttcaccgcccagttcaccgcaaatacctacccatttgccgcgctgatgcgcagcggtaacaatctgctgcaacatgcgcaggaacgatggcgtaatcgggttatacagcggcgatacgcgcgggttattacgatcgactgcatacagatactgggtcatatcgttagaaccgatactgaagaaatcgacctcatcgcagaagtggtcgatgatgtagcacaccgacggcacttccaccatgatacccagcgtaatcgtctctgcatgacgcaggccatcgcgcttaagctcaacgatcgctttttggagctcacccttcacccataagatctgatcgagactgtggaccattgggatcatcaactgggcgttgccgaaactggcagcgcgcaaaatcgcccgcaattgagtgcggaacaggccagcaaattccgggtaaatacgtaccgcgcgatagccgaggaacgggttctcttcctggggaatgttgaggtaaggaatgcttttatcgccaccgatgtccatcgtgcggaagataatcggcttgtcgcccgccgccagtagcacctgctggtacgcttcaaactgttcctgctcgtccggcgcgctgtcgcgatccatatagagcatttcggtacgaaacagcccaacgccttccgcgccgttggcaaacgcgcctggggcttccagagctgtgccaatattcgccgcaatatcaatacgctttttatcacgggaataggccagctgcgcggcagcttgcgcctgttgtttttggcgtttatccgccagcgtctgcgccacctggtaataaccgctcaccgcatcgttgggattaattgccagtacgccgcactgggcatcaagcactgcaggttgcccggcataacgggcaatcgcatccagcggcaggccgctcagtaccgggatcgccgaagcgcgggccagaatcagggtatgcgaggtgcgcccggttttctccagaatcatgcccgcaagattttttaaatcgaggctcaaaaactggcttggggttaaatcttcagccaccagaatggtcggtttttcaagcaccagattattgcgcggttttagttccggccaggtgatatgcagcaactgttcgctgatatcgcgaatgtcgctgacccgctcgcgcagataatcgctggcagaagcagaaagtttggcacaaatctgctccatattgctgatgatcgccgcccccagcccctgatgctgttctgccatcaggtgacggatattgcctgcaaattcatcatcctgaatcagcgacaaatgggcgctgaggatagttttgctttcgccgtcacgctcacgcaattgctggttcagttgctcggcaagcgttgccagactgtgctccagtagggtggaatcttgcgcactcgcagggatcacccgataactgtcgaggctgtcgctctgtaacagggtcagtgtacccacgccaacgccgcttgccagcacgttgccgtacagtaaatccgggttcaggcggcttaatgaacgcggcagcggatgcgccgtcagttctgccagcgtcggctggacgctatcgctgtcgataaagcgcacctggatatactcttccagcactcgccgcgcctgctcttcatcgctaccgctaatgttcaggctgcaactgtcattaaataaagtgccagtgccaatcagcgccagcgagcttttcgcatcggcctttgcgttctggcgatggttaataaaagtgatttcgctttgccactggctgcactgctctttaagttcccacgccggacgagcatgtagaccgttaggcaaaggacagagaaattgaatcgttaacataaccgctccgggttaatcaggagatcatctgaaatccgtcagttgaacaaccgtctcacgcgtaagacgttgaataagggcagataaaagttgctccatctgcaaaatgtcacggcagtcggcaatcgatgcggcgcaatgtccgtggcgggttgcaggccccatcaccactgtgggtacgccagtgccggttaaatgcaccgccccgccgtccgttccgccgttgctgaacatatctgactgcaacggtacgccaatttctgccgccacggtttcgatccacgcggtaagttttggcggcgcaatcagtgacttgtcgcttaacaccagcatcggcccgttaccaatctggcgatggttagctgcgccataatcaaagtttttcgcccagcaggcagtatcaagcacaatggcgacatccggcgacaccgcgcgggtggcagtttgcccgccgcgtaatcccacctcttcgctggaacttgccaccagccacacttccgcaggcagttcggcgtcgtgcagctcacgcagtaacgtcaccagcagatagcaaccgaggcggtcatcaaaggctttccccatcactcgctggtgagggagaacctgaaaagtggtatcgaaggtgacgcgatcgcctggacgaattcccgcctgcatcacttcgtcacaggagcgcgcgccaatgtccacgcgcatggcgctgacgtcattcccctgccggtcgccgtcaagcaggcctggaattttgcactcttcacgggtagtgatacgcaccgactgaagctggcgggcagccatgcgtacattgccaaccggcaacacatcgatcgccccttcgcgggagatgctgcgcaccataaatcccacttcgtccatatgcgcacagatcatcaccttcggacctgtcgactcattgagtcggatcagcaccgatcccaggccgtcaaaacggacctctttttgctggcgatccgcttcatccagcaggatctgccgtacttcctgttccgaggaggcgatcgcatctgcctcgctcaacgcttttaagagcgataaatccattatgcctctcccgtgagcaacactgttttcggcatggcgtagagcacttctgcgccttgcggggtgaccagcacgacatcttcaatgcgcacgcccccttgccctggaaaataaatccctggctccacggtcagtaacatacctggctgtagcgtcgtggtgtcccgcggtgaaaaacgcggttcttcatggacttcaataccgatagcatgaccggtgttatggccgaaaaacttgccataaccggcctcggtaatcacgcggcgcgcggcatcgtcaacctgctggcagcgcacgccggggcgaattacagagattgccgcgagctgtgcctgcaggacaatctgatagacgttaaacagcgggtgagattcggcgctcaccccttcgccattcaccagcaaggtgcgcgtcatatcagagcagtagccctgatagagcgcaccgaaatcgagagtgacaaactcgcccgctgcaacaatcttgtcgctggctttaccgtgcggcagcgccccacgccagccactggcgacaatggtatcgaaagaggctttttctgcgccctgccggcgcataaaccactccagttcagcggctatctcgcattcgctcatccccgcctgaataaagcggcgaatatgctctgcgccacgatcggcaatcccgcaggcaaggcggattttctccacctcttctggcgttttgatttgccgcagcacatccggcgtggcgctaaccagtttcgcattgagttcggactgccagcggtgcgcggtttcccaactcacctgctggccttcaaaaccgagcgtttgcaactgctcatcggcaatgatttgtctgacgatggtggcaagcgtgtgcatcgcgtcgagcaaatgcagctggtaaccttgcgtgcgggcttcaacatccgcgtaatagcgcgaatccaccagaatgtgcgcactttcacggctaatcaccacatagcctgatccggtggagatccccagatgcggctgtttgttctgccgtgaggagagaagcaccgcatccagttgttgtgccttaagccagtcgcgcagcgaagcgagtaatgtcatctggatttttccttcttacaggctctcgattaacaatttacctttgcggaacatcatcagacgcaagaacaccaccatcagcgcagtaatgattgctcccagcgcgatccccgccatatagacacccagattagtgaccagcggccacgcccagatagcggactccgggaaccattgcactgcgcccagccagacagcggcggttgagccgacaatcgcgccgaccatatacgacggaatggcggtgatagggctttccagtgcaaacggaatcgcaccctcactgatccccataaacgccaggaacatcgcggttttaccctgcggataaagctgggcgttgaacaagcgtttgccagttaagcgacgatcgataatggtcgccagacccagaccaatcggcggaataacgatagcgatagaacgtgcagtgaccggtaatacgtggtcagtggtaaagctgaaggcaacgaaacctgccgctttgttgatcgggccaccaaggtcgattgctgtcgccgcggcgatccccattgcgtacatcagcgcgcccttctcacctgcagcggtcagcacggtacggataccgccgttgatccagccaccaaagggggtgatgacgtagtacatcgccagcatgacaaaaatggcggaaagaatcggtagcaaaaatgtggttttgaacgctaacaggaaatccggtaactggattttctggttcatccatttcacaaggtaaccggcaacgatagaaataatcagcgcaccaatgaaggtggacggcaccggcgaagaggtcgcccattgcatcgtgctgggatcgaagttcagcagttgcgtcggctgggtagacatcaagccgccgataaaaccagccgggaacgccagtttgccaccgatagagttcgccacaaaagcagcaaacatcggaatggcaaaaccaaacaacacgccgccgaaggactgcgacagccaggcaaatttaagtaaggagaggtcgaaaccggagaatttcccgctattaagagcatccatgatgccgatatcagcaggaattttaagccagctataagcaatcagctgactgaaagcgaggatcacaccgcccataattaaggtcggcaccatgcgtgaaatccctgacatcacatgctgcgggagttcaccccagaagctggatttagaggcctgcggattcttaactgccgctgccgcaccggatgcgccatgcacaacggttgcactgcgttttttaatggccataacaattatccctgtcgaatattactgttgttcagaggcaatcatctcttcgatttctttgatgattcccgcagcgtttttaattgcgtcctgcaaagtgatttcataaacgtcgcgtgattcgaaacgttcgttatcttccggggtaactgccacggagtggatgatgatggtcgcttcggcgatatcctgcgccgtcaggcgattctggataccgtccgcgccctgggtttcaattttcacttcataaccggcttctaccgccgcttcttccagcgcctgagcggccataaaagtgtgagccaggcccattgggcaggcacataaggcaatcagtttcttactcatcgttaattcctcgttcagtgatagttgacgagtgaaattatgaacgtgcaaaacaaatcgccgttaccagacaaataatgcatttactggagaattaatcccgctgtacggaagtgtgacgcaggtcggccttgtgagggggacacaaagaaaatttaattaactgtatgatttaaaagattatcgggagagttacctcccgatataacaggaaggatttagagaatgtgacctaaggtctggcgtaaatgtgcaccggaaccgagaaggcccggattgtcatggacgatgagatacaccggaatatcatggacatattctttaaagcgccctttatcttcaaatgcggcgcggaaaccagaggctttgaagaactcaaggaagcgcggcacgataccacccgcaataaacacgccgccaaatgtcccgagattgagcgccagattgccgccaaaacggcccataatgacgcaaaacagcgacaacgcgcggcggcaatcggtgcagctgtcagccagcgcgcgttcggtaatatcttttggcttgagattttctggcaggcggttgtcggctttaacaattgcgcgatacaaattcaccagtccagggccagaaagcacgcgttccgccgaaacatgaccaatttccgcacgcaatatttcgaggataatgccctcttcttcactattcggcgcaaaatcaacgtgaccgccttctcctggcaagcttacccaacgcttatcgacatggaccagatgcgcaaccccaagccctgttccggcaccgtaaaccgcaataggcttaccttctaccggttctgcgccaccaaactgaatcagatgctcttttttcagcatcgggatcgccatcgatacagcagtaaaatcgttaataatttccagatggctaaaaccgagattctttttcatttcggcaattgagaacgcccaggtatggttggtcattgccacccagtcaccggtaattgggcaagcgatggcaatacagccgtctttcacctcgaccttatgttcttcaagataaacgcgaatgaccgcttcgaggctggggtaatcaagccctgaataggtcttagcctgcgagatttcaccactggcaatatcacacagagcaagacgtgcgttggtgccgcccacatcaccgactaatgcatactttgtcattcttcaactgctccgctaaagtcaaaataattctttctcacactgtaaatacctgggggcataacaacaacgccggaaaggcaggctccctgtaaatatcgatctgggtcacacaattactttatcgtttcagcaccaattgcagcgatgcctttttgcaagctgggcaaactaagtatctgaccccgcataaggaatagaacatgctccatccgcgagccagaaccatgttgttattatcgctccccgccgtggcaattgggattgcgtccagtcttattctgattatggtgatgaaaatcgcctcggtattacagaatttgctctggcaacgactgccgggaactctggggatagcccaggattcacctctctggatcatcggtgtattaacgctaacgggtattgcggtggggttggttatccgtttcagccagggtcatgccggaccagatcccgcctgtgaaccgcttatcggcgcaccgattccgccctctgcgctaccaggacttatcgtagcattaattctcggtcttgctggcggcgtcagcctggggccggaacatccgatcataaccgtcaatatcgcccttgccgtcgccattggcgctcgtctgttaccgcgcgtcaaccgaatggagtggactattttagcctctgccggaaccatcggcgcgctgtttggcacacctgttgcggcggcattgatattttcgcaaaccttaaatggcagtaatgaagttccgctatgggatcgtctctttgcgccgttaatggcggcagcagctggtgcacttactaccggattatttttccatcctcatttttcactgcccattgcgcattacggacagatggaaatgaccgatattctcagcggtgcaattgtcgcggcgattgccatcgcagcagggatggtcgccgtatggtgcttaccacggttgcacgcgatgatgcatcaaatgaaaaatccggtgttcgtgctgggtattggcggatttattctcggtattctgggggttattggtggaccggtttcgctgtttaaagggctggatgagatgcagcagatggtggcaaatcaggctttcagcaccagcgattactttttgctggcggtgataaaacttgccgccctggtcgttgctgccgccagtggctttcgcggtgggcgaatcttcccggcagtgtttgtcggcgtggcattagggttgatgcttcatgagcacgttcccgccgttccagcggcaataaccgtttcctgcgctatactcggcatcgtgctggtggtaacacgcgatggctggttaagtctttttatggcggcagtcgttgtacccaataccacattgctaccgctgctctgtatcgtcatgctcccggcatggctgttattagcaggtaagccgatgatgatggtcaatcgtcagaagcaacagccaccccacgataacgtttagcaaaaaatgctctcctttatgatttaagagttatggcgatgatacggcgctttacctccccgtaatattgcgttaacaggccgctgacggcttcgatcgtgaaggagaataacaatgttcaggtcactgtttctggcggccgccctgatggcatttaccccgcttgcggcaaacgcaggtgaaatcaccctactgccatcaatcaaattacaaattggcgatcgcgatcattacggtaattactgggacggtggtcactggcgcgaccgtgactactggcaccgcaattatgaatggcgtaaaaaccgctggtggcatcatgataatggctaccatcgtggctgggataagcgtaaagcgtatgaacgtggctatcgtgaaggctggcgcgatcgtgacgatcatcgtggaaaaggccgcggacatggacaccgccattaaacacattcgccaatggagcacaatgcctgatgcgacgctagcgcgtcttatcaggcctacaaaccagctctttaacgcgtagggcggataaagcatttacgccgcatccgccaatggtgccaaatgcgacgctcattcaactacaatcccagtgccgttcctaccagtaaccagatattcagcgccactaccagcaccacaatcacccagcctgtctgttttacgcgtttactgttcaccagatcgcccatcaacttgctgtcactggtgaaaatcaacagtggaaccagcgccagggcgataccaaaacttaacagcacctgactcataaccagaatccgtgtcggatctaatcccatcagaatgacgataaatgacggcagcatggtgactgtacgacgcacccacagcgggatatgaaagcgaatgaagccctgcatcactacctgccccgccagcgtccccaccaccgttgaagacagtccggcagcaaccaggcttaatccaaagaccgttgccgcagcatggcttaacagcggttgcagcgtcagataagcctcatcaagatcggcaacaccagtatgaccagaaaagtggaacgccgccgcagctgtagccatcatcgccagattgacaaaaccggcaatcgtcatggcgatagccacatcccatttggtggcggaataacgttgttgacgcgaaccgccatgtaaatgctgagtgagcgaagagtgcaaataaatcacatgcggcataatcgtcgcccctaacacgcccgctgccaggaagaccgcctccgaagtaggtaaactcgggattaccattcctttacccagctgcgccaggttaggctgggagaaaatcaactcgacaatgtaagccgcggcaacaaacaacagtaacccgccaatcactttctccagcggtttttgcccgcgacgttgcagcattaaaatcaggaaagtcgcgatccccgtcagcaccgcgccctgcaacaacgaaacaccaagaatgagtttaaaaccgatcgccgcaccaataaattccgccaggtcggttgccatcgcaataatttctgcctgaacccaatagaaccacacgacggggcgcgggtagtgatcgcgaatctgctccgccagatttttaccggtggcaatccccagtttggccgagaggatttgaatcagcatcgccatcaggttagcccaaacgacaacccacaataactgatagccgaagctggcacccgcctgaatattggtcgcaaagttaccgggatcgatataaccaatcgccgcaatgaacgcaggtcccattaatgcgagcctcatcttgcgcgccgcccgtccgctgctactctcaacgcgatagttcgtcatcttgtgcctctaaaacatagcctttgctatgtttcatgctacgttaaatgagaatgattatcaaattcatttaaatgggttgtgatgatttctctgatagaccaggattatgactacgaaaagatagatgactcgaatgttatggttatgtttaatattagcacatttacataaccttccgcttccatacacaacatagcagaaatgtatgacagatcactatttttgaagcttgtcacaggacgtcattatagtgtgtgtcagatctcgttttccttaaccatgttacatagaatgtgcacggaaatttaacctgcctcatatttggagcaaatatggaccgcgtccttcattttgtactggcacttgccgttgttgcgattctcgcactgctggtaagcagcgaccgcaaaaaaattcgtatccgttatgttattcaactgcttgttatcgaagtgttactggcgtggttcttcctgaactccgacgttggtctgggcttcgtgaaaggcttctccgaaatgttcgaaaaactgctcggttttgccaacgaagggactaacttcgtctttggtagcatgaatgatcaaggcctggcattcttcttcctgaaagtgctgtgcccaatcgtctttatctctgcgctgatcggtattctccagcatattcgcgtattgccggtgattatccgcgcaattggtttcctgctctccaaagtcaacggcatgggcaaactggaatcctttaacgccgtcagctccctgattctgggtcagtctgaaaactttattgcctataaagatatcctcggcaaaatctcccgcaatcgtatgtacaccatggcagcaacggcgatgtccaccgtgtcgatgtccatcgttggtgcatatatgaccatgctggagccgaaatacgtcgttgcggcgctggtactgaacatgttcagcacctttatcgtgctgtcgctgatcaacccttaccgtgttgatgccagtgaagaaaacattcagatgtccaacctgcacgaaggtcagagcttcttcgaaatgctgggtgaatacattctggcaggtttcaaagttgccattatcgttgccgcgatgctgatcggctttatcgccctgatcgctgcactgaacgctctgtttgctaccgtgactggctggtttggctacagcatctccttccagggcatcctgggttacatcttctatccgattgcatgggtgatgggtgttccttccagtgaagcactgcaagtgggcagtatcatggcgaccaaactggtttccaacgagttcgttgcgatgatggatctgcagaaaattgcttccacgctctctccgcgtgcggaaggcatcatctctgtgttcctggtttccttcgctaacttctcttcaatcgggattatcgcgggtgcggttaaaggcctgaatgaagagcaaggtaacgtggtttctcgcttcggtctgaaactggtttacggctctaccctggtgagtgtgctgtctgcgtcaatcgcagcactggtgctgtaagaccatacataaaaaagccggggtaattccccggcttttttacgcctgttaatcagctaatggctgcggacgaccaattaaatatccttgcagatattgcaccccaagtttatgcaatagcgcctgctgctgtggcgtctcgacaaactccgcgaccacactcaatgacttcgctttcgccagatcggtaattgatctcacaatcatcgcatccagcgtgttcgtgacgatatctttcacaaagacgccatcaattttgatgatatcagcctgcaaacgctttaaccgttcgtagttggcatatccggtgccaaagtcatcaattgcaatccggaaaccaaacttatgcagctgctcgatgttgtacatgctgctttctgcgttagaaaacgcctgctcctcggtgatctcaagaatgaccgcctgcggggagatgtaataacgcttaaacagacgaataatccgcccggcaatattcttttgcagcagcgtgagcggcattaaattgactgaaaagcgtggaccttttttgtcgcaagggtgtgttgccagccacttcaacaaggattccagcacttgcaaatcaaaacgcgcgctaaggttaaactgagcaataaggggcagaaacttatccggggtcataatgccgccgtcatacttcagtcgcgcgaggatctcatcataaccttcaccctctttgttgcgaattggctgggcgtagagcagcaaatcaccctgatctaacgccgtgcgaatggtattcagcaatagcacctgtttagtggtttgcccggaaaccatctcctctctgctatccagcgccagcacatgatgatgtgcgcaggattgctccgccagccagcttaactgccccaacaagggttgcagggtttcctgatttccatcaaaacgcccccaggcagcaccatagcccatatccagcccggtattgttccagtgaatttgccgactattcaggatgttaaccatatgctggagtcgcccttccgtttccggcccgctcagcactaacagcagttcactacccggcaattgatacaacttttcgttttcctgcatcaacggcagcagcgtacggtaaattgagcggatacagtgaacgcgcattattaagccgtaatgacgactcataaactcaagattatcaatgcgcaggcagcaaaaactcttgcccgcctcttgctccggcgcttgctccaacgcacgaaagttgggtagaagcgttaacggatcggtcagcgcctgcaaatgccagcggcggttaagccattcactacgatgataaatacgcaccatatagagcaggcaaacactaaaggaaatcagtactgcgagaataaatgccagcgaatattcggttagtaccccttgcaaaaagttctggttgtaattcagaaggcaaagcgttgaaacagcccaggtgagatttaaaaacggatagcgaatcttaccgacaccgagggtaaagatgataaagaaaacaggtaccaggtaaccggcaataaagtcattttcatacggtgtgcacatcagaagtagcagcacgctaagagctgccagccagcttaaggtaaatgcgcgtttctctttgctcaacgacggagcgatatccctacgccacaatatctgtgcaaagtggggacttacaatcatgcgggtgagatagtaaaaaagcatgttgtaaatcagcactgcggtgaaaaggcttagcaaatcaacgaccgtgaaaatggcatccgcatcgccgaaaaaggtagatatctttagcggaaaatcaaagaaatttcccacaagatacatgctgcatttgatgccaatcggcgccaccaaaccaagccagaacagacgttgccagacgtatcggctggtcaatccataacgccaacgcgtccccaattgccagcgtaatattgcacaggcacacaggactgcaaacgcctggctgccgatcatgacggcggtctgtaaaaaagagagatgcaggttccacagattggtgcaaaacatcccgcataaaatgggaacgacaccacgccagccaaagataaacaagattgacagcattacgcacagtggcatccacgccagaaagatataattggaatggataacagcaagtggcgaaattaaacgggatagctgaataagtaccacggtgagcgtaaacgctagtgtgaatatcttgatattttttatcaggttatgctccacaaacatgagtacactactctcactgatcggggttttcaggcacacaaataataagtttattcgcatcgcgaagcaaacaggggccagcctgttgctgttttttcagtcagtgatgcattcaccacacggcactgccaggatatagactgtattacaaaagcggcaaaaggcagagacaaaaaacccccgctttgcagcgagggtttgaaatttggtggagctaagcgggatcgaaccgctgacctcttgcatgccatgcaagcgctctcccagctgagctatagccccacgagtcgtttacgtaccaaatttgctgggtgcaaaatttggtggagctaagcgggatcgaaccgctgacctcttgcatgccatgcaagcgctctcccagctgagctatagccccatcacgtaaagcttgtcgagttgacgggcggcatcatatgaattccgcccgaatgtgtcaacggcaaattgccacgtgtagtttcaatcgctgaaaaatcaggcaaatgaacaattttggaaaaccgctcgcattcagtagttattcatgtcacggtttcctgtaaagtggtgttataaaatgaactactaatagacccacatacattcagggaattgttatgttcaaggagaggatgacgccagatgaacttgccagactgaccggctatagccgccagaccattaataaatgggtacgcaaggaaggctggacaacgtcaccaaaaccaggcgtccagggtggcaaagctcgactggttcacgtcaatgaacaggttcgtgaatatattcgcaatgctgaacgtccagaaggtcagggagaagcgccagccctttctggtgatgcgccgcttgaagtgttgctggtgacactggcgaaagagatgacgccagttgaacaaaaacagtttacatccttgcttctgcgggaagggattatcggattgttacaacgcttagggattcgcgatagcaaataatatgaaaagattacgcaataaaatgaccaccgaagaactggctgaatgcctcggcgtggctaaacaaactgttaaccgttggatcagagaaaaaggctggaaaacggaaaaatttcccggcgtgaaaggcggtcgtgccagacttattctggtcgatacgcaagtttgcgagtttattcagaacacgccagccttccataacacaccgatgcttctggaagccgaagaaccccttgccgaatacgcaccgggtattcgcactcctgcttatcggcaaatcatcagcgcaatagacaacatgactcacagtgagcaagaaaaagttgcgcaatttttgtcacgcgaaggaattcgtaattttcttgctcgtctcgacatagatgaatcagcataaataaaaaacggcaggggtatctctcctgccgtttatcttttatgcgctaattactgctgattttcgcgttcagcaataaaagccagcgctttgttgatacgctcgatactgcgggtcttaccgattgcgtgaacggtaacatccagcgccggagactgccccgcaccggttacggcgacacgcagcggcataccaactttacccatacccacttccagctcatccgccgtcgcctgaatagcgtgatgaacgttttcagcggtccagtcagtaatcgcagtcagtttgtcacgaactacttccagcggctgacgcgctaccggacgcagatgttttttcgcggcgtcggcatcgaactcagcaaaatcttcgtagaaataacggcagctctgtgccatctctttcagcgtcttgcagcgttcgcccagcagtttcaccagatcagccagctgcgggccgttacgggtatcgatattttcctgctcaatgtgccactgtaagtgagtagcaacatactccggcggcaacgcgttaatgtagtgatggttcagccacagcagcttgtcggtgttgaacgcactggcagatttgctgacggcattcagagtgaagtatttaatcatctcttcacgagtgaagatttcctgatcgccgtgggaccagcccagacgcaccagatagttcagcagtgcttctggcagataaccatcatcacgatactgcattacgctgaccgccccgtgacgtttggacagttttttaccgtcatcgccgttgatcatagaaacgtgcgcgtaaaccggtaccggcgctttcagagccttaagaatgttaatctggcgcggtgtgttgttgatatggtcttcgccacggataacgtgggtgatttccatatcccagtcatcgacaaccacacagaagttataggttggggaaccatcggtacggcggataatcagatcatccagctcctggttgctgaactcgatcggaccacggatctgatcgtcaaaaacaacagaaccttcctgcgggttagcaaaacgtacgacacacggctcatcatcagcgtgatgctcatgactgtggcggcagcgaccgtcataacgcggcttctcacctttcgccatttgctcttcgcgcagcgcttccaggcgctctttagagcaatagcatttataagctgtgccctcttccagcatctgatcgatcaccgcgttgtagcgatcaaaacgtttggtctggtagtacggaccttcatcccactccaggctcagccagttcatgccatccataatggcttcgatagcttccggcgtggaacgctcaagatcggtgtcttcaatacgcagcacgaactcaccgccgtggttacgtgcaaaaagccaggagtaaagagcagtacgcgcgccgccaacgtgcagatagcctgttgggcttggcgcgaagcgagttttgattttcatgaaatggccttacgtttagaaagatgccgacaaccggcaaatcctggaaaaattgagtgggcgatattctatcactcccgcctgattcctcaatgtagttcgggttgcaaccttacgcattattgttttcgttgacaaattgcgcaacacggtctgttttgcgatcatcttgcttaaatttacgacgaacgaacaatttctttagaaaatgcgttgactcattttgaactctccctataatgcgactccacacagcgggggtgattagctcagctgggagagcacctcccttacaaggagggggtcggcggttcgatcccgtcatcacccaccaactacttatgtagtctccgccgtgtagcaagaaattgagaagtgggtgattagctcagctgggagagcacctcccttacaaggagggggtcggcggttcgatcccgtcatcacccaccactttctcgccagctagatttcttgtaaaaatgtgaagtaccgaagtgggtgattagctcagctgggagagcacctcccttacaaggagggggtcggcggttcgatcccgtcatcacccaccacttcgggtcgttagctcagttggtagagcagttgacttttaatcaattggtcgcaggttcgaatcctgcacgacccaccaatgtaaaaaagcgccctaaaggcgcttttttgctatctgcaatttgcgaaattgcctgatgcgcttcgcttatcagaccaactatgtccggcagttcccgtgcctctcatctactgcgccaacgccgccagcagtttaaccagcgcgggcgtcacctgctgcgtttcataaacaatatataagtctgccgggatgcgttctttgagcggacggaatatgacaccgggccagttcatctgcgcgtagctgtccgctatcaatgtgataccaatacccatactgactatggcgagtaccgtttgcggttcattaacttcgcgaataacaaccggtgaaaatcccacctgctggcaaactcgctgcaaaaaatcccagtcagtgtacacgggcggcattgtaacgaaatactcgtcacgtagcgcttccagcgggacggtggaaaatgatgagagatgatgctcttcaggcatcgccaccagaaacgccgattcatgcaaccgtaagctggtaaaaccagtcggtggttctgtcgccattcgccagatcccggcatcaagttcgcggcgttccagcaaggccatttgcatcgctggcatcttttcgcgaaacagaacttcaacgttaggattttctctaaggaatcgccgcataaccgggcgcatccgtccccacattgccgttcccacaaccccgagttcaatccgccctgcttctccccgacctatttgttcaacccgagccaatatattatttgcattcaccagcaatcgacgcgattcttccatcaagattttgcccgcgtgtgtcagtacgacgctgcgcgaatggcgaataaaaagctgcgtaccgagttgattttccagctctttaatatgaatactgagcggaggctgagacatatttaaacgcgctgctgcgcgaccaaaatgcaactcttccgctacggcaagaaaataacggagcaacttaagatctgttctatatacgcgttccataattaagtgctccatataaaaaatacatcgtattaaattatcatggcataaagtatttcaccaccagatatccgatatacataaacacgatggataatatacccggcaatacatttggaacaggaataggtaatcgcacgattgtaaacaaagcaccaatgccaaaaccaacgccagaagaaaataaaatatctttcactaattaacctttatcataaaagcagccccaaggaacagagctgcgaatccttttaatgtgtaactgaacgatgcgttatcttttcagggtcatggttatatttaaacccaaagaaaaatatcactgcgaggaaaagagcataccctgcaaacatcagccaaatggtatgccagtcttttacgccatccaccgagaagtaatccactgccataccgctcagaatcgagccaacccatgcgccgacgccatttaccatcgtcataaaaaggccctgggcgctggcacgaatgctggaatcaacttcctgttcgacaaagaccgaaccagaaatattgaagaaatcgaatgcacaaccgtaaacaatcatcgacagcaacagcaaaataaacccggttggtgatggatcgccataggcaaagaagccaaagcgcagcgtccacgccaccatactcatcagcatgacggttttaataccgaaacgcttcaaaaagaacggtatcgtcagaatgaaaccgacttcagccatctgtgaaactgacagtaaaatggacgggtatttcaccacgaagctatcagcaaactcaggattacgggcgaaatcatgcaggaacgggttgccaaaaacgttggtaatttgcagcaccgcacccagcatcatggcgaagaggaaaaagatagccatgcgtggatttttaaacagcacgaaggcatccagacccagcttgctggcaagcgatgtagtcgcttttttctccgcaaccggaatcttcggcaaagtcaacgcataagccgacagcagcaatgacgcaccggacgcgatatacagttgcagactactcaattccagatgcagcaggcttactgcccacatggcgacaatgaaccccaccgtaccaaaaacgcgaatgggcgggaaagcggtcaccgggtcaagccctgcctgggcaagacaggaataagagacgctgttcgataacgcaatagtcggcataaacgccatcgcattgactaacatcacccaaaacatcatatccggatcagttacggatgccgcataaaaaagtacgcccgcacacaccaggtgacacagcatgtatgcacgttccgcacgcagccatttatccgcgataatccccataatgccaggcataataatcgcagcaatccctttggagctatagaccataccgacatttgcgccggtaaaatgaagggtattaatcatgtaagaaccgagggtaaccagccagctcccccagataaaatattgcaaaaaggacattacctttaagcgcaaagcgatgctcataatcgtttccttgtcgcatcatatggcctcactcagtgaggccgtttattgttgttttactcaggcaattttgcgcagaaagccgcaaataagattaataaagttttgctttgagagttccgctgctgccagcgtttgggcatgagaaagcttcacgtcactcagaccttccgccatgttggtaatcgcagagaccgcaacgactttaagttcgcaatggcgagctgaaataacctcaggcaccacagacataccaacaacatccccaccaataatttgcatcatgcgaatttccgccgcagtctcgaaattcggccccggatatgagacgaacacgccctccgtcagagggaacccctcttctttcgccactttttgtaacagtgcgcggtattccgcatcgtaggcattcgccagcgagaagaagcgctcaccaaaacgttcatcattaagacccaccatcggcgttcccggcatggtgttgatgtgatctttcaatgcgaccagactgccggcccccacttcagggcgcagtgagccagccgcattggtgcagaacagcaactcgcagcccagcaacttaaaggtacggattgcatccgtcatgatggtcatcccacgaccttcgtagaaatgtccgcgacctttcatacacgccactggcaccccctggagataacccagcaccagctcacccgcatgaccgtgtacggtacttaccgggaacccaggcagcttttcgtaggaaattgcgaccgcgttctcaatctgatcggccagcgcgcccagcccggaacctaaaataaaggccactcgtggcgtgaaatcaggtttataagtcttgataatatctacgcaatacagtgggttatgagaaaactgagcctgatacatatatatcctttttttgtagggtggaatctaacgcctttttataacgagattgccctacctcataccaatacacttttttcatgtatccgatagttattcgatatcgatatatttatattttttcactattaataggctgaaaaaactgtattggtactctcctttcccttgcattaacaatatgccgcttttaatcaaccttttattaagcaatcaactaataacgatcggcatagggaattatgctatgaaaaaacatctttttactctgacactctcttctgtattggcgataccagcagtatcccatgcagaatttaaaggcggttttgctgatataggtattcattatcttgactggactagcagaaccactgagaaatcgtcgaccaaatcacacaaagatgattttggatatctggaactggaaggcggcgctaactttagttggggagaaatgtacgggttcttcgactgggaaaacttttataatgatcgtcatgataaaccgggtagcgagcagcgttatacatttaaaaataccaaccgtatttacctgggtgacaccggatttaatctctacttgcatgcgtatggcacctacggttctgcgaatcgtgtgaatttccatgacgatatgttcctttacgggatcggctacaatttcaccggcagcggttggtggttcaaaccgttctttgcaaaacgctatacagaccaaacctattataccggcgataacggttatgtcgccggttgggttgcaggttacagctttatgctgggcagtgagaaattcaccctcaccaactggaacgagtacgagtttgatcgtgatgccacctacgcggcaggtaatggcggcaaagaaggtctgaacggtgccgtcgcactttggtggaatgcaacttcacacatcaccacagggattcagtatcgttatgcggatgacaaactgggcgaagatttttaccaggatgcgataatctactccatcaaatttaatttctgattgattactgccggagctcccggcagtatgaattcactctatatctgatacaacggatccccttcccgcccagccattagcgcattgccctggtctcgtactacgtcccataacgcttgtgcggcggtggaaagtgaacggttcttcctgcgcaccagcatcaactggcgttcaaccactggcgtaatgcgctttaccaccagtgggctaccttcaggcaatggtagcgccagtgcgggaagaatactgatgccgatgcctgcggctaccatcgggaacagcgtcgccggatgaccaatctcctgcacaatattcgcctgaataccgttgcgcgccagcgctgcgtcaatcagcggtcggctgcctgacgcgtaatcctgcaacaccaatttcgctccctgtaatgcctgccaggggacataatcttccacggccaaagcgctatcgcgatggcaaagcagaaagaaaggctcggaaagaatcgcttcacattgcagatcgcccactgggcctggatcgatgacgatgccaaaatcgacatctccctggcgaatactttccatcacccactgctgcggacgatcgtgcaggacaaactgaatatctggatagcggcgatggctttcagcaatgcattgcggaataagatgcgcggaaatggtctggctggcagcgacccgaacttttccgctcagttgttgccccatacgcccggtatcgcgcaacgtgctgttaagttcatccagcagtcgctcaagacgcaaagccaactgctgccctgcatctgtaagcaccacttcacgcgtggttctgtccagcaggcgaacaccagtatgattttccagctccttcacactgtgactcactgccgactggctcaggccgatacgctctcctgcacgactaaaacttttctcctgcgctactgtgacgaaaacctttaattgctttaaagaataattcatctgtttttttcatgaatggatgcaataaatcaattttatttctcaaactggaagaagcacaatagaaccatcgatcatctggagtctttatgaaactttttcgtatcctcgatcctttcaccttaaccctgatcacggtggtgttgctggcatctttctttccggccagaggcgatttcgtccccttctttgaaaatctgaccactgcagcgattgctctgctgttctttatgcacggcgcgaagttgtcgcgtgaggcaattattgctggcggtggtcactggcgactgcatttgtgggtaatgtgcagcaccttcgtgctgtttccgattctgggcgtgctgtttgcctggtggaaaccggtaaatgtcgacccgatgctctactccggttttctctacttgtgcattctccccgcgaccgtgcagtctgcaatcgccttcacgtcaatggcgggcggtaacgtcgcggcggcggtttgttctgcgtcagcatccagcctgctggggattttcctttcaccattgctggttggtctggtgatgaatgttcacggtgcagggggcagccttgagcaggtcggtaaaattatgctgcaactgttgctgccatttgtgttggggcatctttcccggccgtggattggtgactgggtgtcgcgtaataaaaaatggattgcgaaaactgaccagacgtccattctgttggtggtttatacggcattcagcgaagccgtcgttaacggtatctggcacaaagttggctggggatcattgctgtttatcgtggtggtcagttgcgttcttctggctatcgtgattgtagttaacgtctttatggcacgccgactgggcttcaataaggcagatgaaattactatcgtcttttgtggttcgaaaaagagtctggcaaatggcatcccgatggcaaacattctgttccccacatcggtgatcggtatgatggtgctgcccctgatgattttccatcagatccaattgatggtctgtgcggtgctggcgcgtcgatacaaacgccagaccgaacagttacaggcgcagcaggaaagcagcgccgataaagcttaaagcggacgcttcaggggctggaccagttgcgtcagcccctcgtttttaatcagcagcgtgatttgcattagctcaccgagcttccctgcagggaactcatctttgcgggcaaaccacagcagatactcctccggcaggtcgattaagcgacgccctttgtacttgccaaacggcattatcgtattggctatttcaatcagctgctctttttccatctcagctacccagcaaacgcagcatttccgtttcgtcgatgacttcaatgcccagttcctgcgccttcgccagtttagatcctgcagcttcacccgctatcaccagatcggttttcttcgacacgctgcccgcgactttcgcccccagttcgaccagtcgagctttagcgtcatcacgcgacatctggcttaagctgcccgtaagcaccacggttttaccagcaaacggactgtcaatctcttccgcattgataacgatcggctcaggccagtgaacaccttccgccaacagctcgctgatgacattgcggttgctttcttcggcaaagaagttgtgaacgtgggaggcaacgacaattccaacatcaggcaccttttgcagctcttcaatcgacgcggcttccagcgcttccagcgtgccgaaatatgccgccagacctgctgcggtagcctcgccgacttcacggatgccaagtgcatagaggaagcgggcaaaggtggtttctttcgctttttccagcgcgttaaccacgttttgtgccgatttcggccccatacgctccagtccggtcagtttgcctgcggtgagtttgaacagatccgccggagtgtggacatattctttttcaaccagttgatcgatgattttgtcgcccattccgtcaacatccatcgcacggcgggaaacaaagtgtttcagagactctttacgctgcgcaccgcaaatcaggccaccggtacagcgggcaaccgcttcaccttccacacgctcgacgtcagaaccacataccggacaatgcgtcgggaatacaacctcacgggtatcttccgggcgttcagaaagcacgacgttaaccacctgcgggatcacatcgcctgcgcggcgaatcaccactttatcgccaatgcgtaaaccaagacgttcgatttcgtcagcattatgcagtgtagcgttactcaccaacacgccagcaacatggacaggttccagacgcgcaacaggcgtaatcgcgccagtacgcccaacctgaaactcgacgtcacgcacaaaggtcatctgttcctgcgccgggaatttaaacgctaccgcccagcgcggggcacgcgcgacaaagccaagctgctcctgctgtgccagtgagttgaccttaatcaccacgccgtcgatatcaaagcccagcgtcggacggtcttcttctactttgtggtagaacgccagcacttcttccgccgattcacaaagcgttacccgatcgctgaccggcaaaccccactttttaaattgcagtaaacggccaagatgagtatccggcagctcgccaccttccagaacaccgacgccgtagcagaagaaagtgagcggtcgcttcgctgtaatacgcggatcaagctgacgcagtgaaccagctgccgcattacgtgggttagcaaacactttcccgcccgtgcgtcgcgcatcttcgttaatcttttcgaaccccgcctgcggcaggaacacttcaccacgcacttccagacgcgccgggatattctctccgtgtagcttcagcggaatggcgcgaatagtacgcacattagacgtaatatcttccccggtggtgccatcgccacgcgtcgcggcactgactaaaacgccattttcatacagaatactgacggcaagaccatccagcttcagctcacagcaccaggtgactttctcgttgcttttcagacggtcctgcacacgtttgttgaaagcaagaaagctttcttcatcaaaaacgttatccagcgacagcattggcacttcatggcggatctggctgaaagccgccagcggcgctgcacctacacgttgggtaggcgaatcaggcgtaatcagttctggatgtttggtttccagctcgcgcagttcgcgcatcagcctgtcgtattcagcgtcgggaatttccggcgcatccatcacatgataaagatattcatgatggcgaagcgtcgttcgcagttctgtcagttgttgttcgattgattccatatcgcaccatcaatgctaaaaacccccgacaagcgggggttcgaagaggagttaatttgccttaagtgtatcaggcgttggcgtctttgacttcgcggatgatgtcctggtactcgcgcaatttctgcggagtcatcatacggcgctgatcgtcaagcactacaccgcccacttcatcggcaatatgctgcgcagattgcagcatcagcttaaagttctgcagctcgtcaccgtaagacggtacctgcataaagatagtgacacccggagtagtgaaatccttcatttcaggatcaaaggttcccggtttcaccatattcgccaggctgaataacgccgggccgctgccatccgggctaagatgacgatggtaaatgttcatatcgccaaaaatgaagcccgcttgttgaatgctgttaagaagcagttcaccgtttagctcgctaccgtgatgcgccgcgacgttcatgataatcaccgcttctttgcgcttcggtttatccataactggagccggttccgctacaggctcaggctgtggtgccgctacaggctctgcaggctggaaagcctgttgtgctggttgcggtgctgaatgcactggctgcggcgctgacgcgacctgtggcgaaacaggctgctgcaacggctgttcaggctgcggctgataggcaggctgctgcacaggttgctgcaccggctgcgttggacgcggagcatgttgcggcggtacctgcgcttcaggcggctgctggaccggttgacgcggctgcgcagacgcataaggcggttggtactggtgttgcggcgacggacgagcagcctcatgctcctgggcgttagccggggcatgattcacgcggtgaacacgaacctcaccaacgccctcatcatcttcgacatcctcgtcataagaatcgtcgtcacgttttgacttcattcgttttaatggccgatcgcggaacatagaagatcgttctttacggctggtccagaaaccatgtaccagtaaagcgattatggcgatcgcgccaacaatgattaatatcagacgcaaatcctgcatcattatattctctgttgttctaacaccttgccaccacggcaaacatttactcactaagagtatttgccgattacctcaagtgcaagtgcactattaactttcacagcacaaagatagatgaaatcgtgctttttgctgttttttcgaacatatcctaactgtccattgcgcaattacccggtaaaatacgcagaattttcctgggattggtcaaaaggagctcatcctgattatggtttcatcattcacatctgccccacgcagcggtttttactattttgcgcaaggctggaagctcgtcttgcaacctgggattcggcgtttcgttattttaccgctgctggtcaatattttgttgatggggggcgcattctggtggctctttacgcaactcgatgtctggatcccgacgctcatgagttatgttccggactggttacaatggctgagctatctgttgtggcccctggctgtcatctctgtgctgttagtgtttggctatttcttctcaacgattgctaactggattgctgctccgttcaacggtttattggctgaacaactggaagcaagactgactggcgctacaccgccagataccggaattttcggtatcatgaaagatgtgccgcgaatcatgaaacgcgaatggcaaaaatttgcctggtatctgccgcgcgcaattgtattgctaattctttacttcatccctggcattgggcaaaccgtcgcgccggtactgtggttcctgtttagcgcctggatgttagccatccagtattgtgattaccccttcgataaccacaaagtgccgtttaaagagatgcgcaccgccctgcgcacacgcaaaatcaccaatatgcagtttggtgctttaaccagcctgtttacgatgatcccgctgcttaatctgttcattatgcccgttgccgtttgtggcgcgacggcgatgtgggtcgattgctatcgcgataaacacgccatgtggcggtaacaatctacaggttattttgtaaaccgtttgtgtgaaacaggggtggcttatgccgccccttattccatcttgcatgtcattatttcccttctgcatatagatatgctaaatccttacttccgcatattctctgagcgggtatgctacctgttgtatcccaatttcatacagttaaggacaggccatgagtaagatttttgaagataactcgctgactatcggtcacacgccgctggttcgcctgaatcgcatcggtaacggacgcattctggcgaaggtggaatctcgtaaccccagcttcagcgttaagtgccgtatcggtgccaacatgatttgggatgccgaaaagcgcggcgtgctgaaaccaggcgttgaactggttgaaccaaccagcggtaataccgggattgcactggcctatgtagctgccgctcgcggttacaaacttaccctgaccatgccagaaaccatgagtattgaacgccgcaagctgctgaaagcgttaggtgcaaacctggtgctgaccgaaggtgctaaaggcatgaaaggcgcaatccaaaaagcagaagaaattgtcgccagcaatccagagaaatacctgctgctgcaacaattcagcaatccggcaaaccctgaaattcatgaaaaaaccaccggtccggagatctgggaagataccgacggtcaggttgatgtatttattgctggcgttgggactggcggtacgctgactggcgtcagccgctacattaaaggcaccaaaggcaagaccgatcttatctctgtcgccgttgagccaaccgattctccagttatcgcccaggcgctggcaggtgaagagattaaacctggtccgcataaaattcagggtattggcgctggttttatcccggctaaccttgatctcaagctggtcgacaaagtcattggcatcaccaatgaagaagccatttctaccgcacgtcgtctgatggaagaagaaggcattcttgctggtatctcttctggagcagctgttgctgcggcgttgaaactacaagaagatgaaagctttaccaataagaatattgtggttattctgccgtcatcgggtgagcgttatttaagcactgcattgtttgccgatcttttcactgagaaagaactgcaacagtaatgccagcttgtaaaaaatgcgtaaaaaagcacctttttaggtgcttttttgtggcctgcttcaaactttcgcccctcctggcattgattcagcctgtcggaactggtatttaaccagactaattattttgatgcgcgaaattaatcgttacaggaaaagccaaagctgaatcgattttatgatttggttcaattcttcctttagcggcataatgtttaatgacgtacgaaacgtcagcggtcaacacccgccagcaatggactgtattacgctcttcgtgcgtcgcgtctgttaaaaactggcgctaacaatacaggctaaagtcgaaccgccaggctagactttagttccacaacactaaacctataagttggggaaatacaatgttccagcaagaagttaccattaccgctccgaacggtctgcacacccgccctgctgcccagtttgtaaaagaagctaagggcttcacttctgaaattactgtgacttccaacggcaaaagcgccagcgcgaaaagcctgtttaaactgcagactctgggcctgactcaaggtaccgttgtgactatctccgcagaaggcgaagacgagcagaaagcggttgaacatctggttaaactgatggcggaactcgagtaatttcccgggttcttttaaaaatcagtcacaagtaaggtagggttatgatttcaggcattttagcatccccgggtatcgctttcggtaaagctctgcttctgaaagaagacgaaattgtcattgaccggaaaaaaatttctgccgaccaggttgatcaggaagttgaacgttttctgagcggtcgtgccaaggcatcagcccagctggaaacgatcaaaacgaaagctggtgaaacgttcggtgaagaaaaagaagccatctttgaagggcatattatgctgctcgaagatgaggagctggagcaggaaatcatagccctgattaaagataagcacatgacagctgacgcagctgctcatgaagttatcgaaggtcaggcttctgccctggaagagctggatgatgaatacctgaaagaacgtgcggctgacgtacgtgatatcggtaagcgcctgctgcgcaacatcctgggcctgaagattatcgacctgagcgccattcaggatgaagtcattctggttgccgctgacctgacgccgtccgaaaccgcacagctgaacctgaagaaggtgctgggtttcatcaccgacgcgggtggccgtacttcccacacctctatcatggcgcgttctctggaactgcctgctatcgtgggtaccggtagcgtcacctctcaggtgaaaaatgacgactatctgattctggatgccgtaaataatcaggtttacgtcaatccaaccaacgaagttattgataaaatgcgcgctgttcaggagcaagtggcttctgaaaaagcagagcttgctaaactgaaagatctgccagctattacgctggacggtcaccaggtagaagtgtgcgctaacattggtacggttcgtgacgttgaaggtgcagagcgtaacggcgctgaaggcgttggtctgtatcgtactgagttcctgttcatggaccgcgacacgctgcccactgaagaagaacagtttgctgcttacaaagcagtggctgaagcgtgtggctctcaggcggttatcgttcgtaccatggacatcggcggcgacaaagagctgccatacatgaacttcccgaaagaagagaacccgttcctcggctggcgcgctatccgtatcgcgatggatcgtaaagagatcctgcgcgatcagctccgcgctatcctgcgtgcctctgctttcggtaaattgcgcatcatgttcccgatgatcatctctgttgaagaagtgcgtgcactgcgcaaagagatcgaaatctacaaacaggaactgcgcgacgaaggtaaagcgtttgacgagtcaattgaaatcggcgtaatggtggaaacaccggctgccgcaacaattgcacgtcatttagccaaagaagttgatttctttagtatcggcaccaatgatttaacgcagtacactctggcagttgaccgtggtaatgatatgatttcacacctttaccagccaatgtcaccgtccgtgctgaacttgatcaagcaagttattgatgcttctcatgctgaaggcaaatggactggcatgtgtggtgagcttgctggcgatgaacgtgctacacttctgttgctggggatgggtctggacgaattctctatgagcgccatttctatcccgcgcattaagaagattatccgtaacacgaacttcgaagatgcgaaggtgttagcagagcaggctcttgctcaaccgacaacggacgagttaatgacgctggttaacaagttcattgaagaaaaaacaatctgctaatccacgagatgcggcccaatttactgcttaggagaagatcatgggtttgttcgataaactgaaatctctggtttccgacgacaagaaggataccggaactattgagatcattgctccgctctctggcgagatcgtcaatatcgaagacgtgccggatgtcgtttttgcggaaaaaatcgttggtgatggcattgctatcaaaccaacgggtaacaaaatggtcgcgcctgtagacggcaccattggtaaaatctttgaaaccaaccacgcgttctctatcgaatctgatagcggcgttgagctgttcgtccacttcggtatcgacaccgttgaactgaaaggcgaaggcttcaagcgtattgctgaagaaggtcagcgcgtgaaagttggtgatactgtcattgaatttgatctgccgctgctggaagagaaagccaagtcaaccctgactccggttgttatctccaacatggacgaaatcaaagaactgatcaaactgtccggtagcgtaaccgtgggtgaaaccccggttatccgcatcaagaagtaattcttgccgcagtgaaaaatggcgcccatcggcgccatttttttatgcttcagccagaggcggcaaaatcaattcatcgctctcatgctgctgggtatagcgcatcacttccagtacgcgcaaccccgcgcggtgtaccgcatcggttaacgccttccctttcagcaaaccactgataagctgagcacaaaacaggtcgccagtccctttcaggtcagttttaacccgggaatgggaaatgacattcacgctgtcggcactgaccaccaccacctgcatctcctgattttcttcattgccggaggcgctggtaatcaccacccactttaatgtgtctgaaagcagactttttgcggcagcaatggcactgtcgagatcgcggcaatctttaccggtcaggatttccagctcaaagatattgggggtaattccctgtgccagcggcagtaaatattgtcgatacgcctcgggaaggtcaggtttgacataaattccgctatcaatatcgccaatcaccggatcgaccatgatcaataggtcaggatggtctttgcgtagcgcagtcagccactcggcaaggattttgatttgcgatgccgttcccatatagcccgtggttacagcacgaagttggcgcagcgcatcacgctcctgaagcgcacgcaaataaccgctaaaccattcatccggaatcgcaccaccgtagaaagtgtcataatgcggcgtattgctcagcaataccgtcggcacggcaaagacattcaggccgttctgtttgatagcaggcaccgcaatgctgttgcctacgctgccgtacactacctgcgactgcacggcaacgatatccgcctgcagtgccctgctcttatcgttaaacaacaacaaactactcatttaattttttctccttgccgatgatcctcatcgtattccagccgaaactttacctgattctggcagtcaaatcggctattacaaaacaaggataaggtaattcagtgaagaaaatcatttgtctggtcgttacgctgctaatgacactccccgcttatgcgaagttaacggcccatgaagaagcccgtatcaacgccatgctggagggattagcacagaaaaaggatttgatatttgtgcgcaacggtgatgaacatacctgcgatgaagcggtttctcatctgcgcctgaagctgggcaatacccgtaatcgcattgatacagccgagcagtttattgacaaggtggcctcgtcgtcatcgattaccgggaagccgtatatcgtgaagatgcccggtaagagcgatgagaacgcacagccttttttacatgcgttaattgcgcagacggataaaacggtgcctgcgcaataatcttaaatccccgccccctggctaaaatgctcttccccaaacaccccggtagaaaggtagcgatcgccacgatcgcagatgatcgccaccaccaccgcgccagggttagcttttgccacccgcagtgctccggcaaccgcgccgccggagcttacgccgcagaaaatcccttcccgcactgccagttcgcgcatggtgttttccgcatcgcgctgatgaatatccagcacctcatccaccagagaagcattgaaaatccccggcagatattccgcaggccagcggcgaatgccgggaatactgctgccttcttccggctgcaggccaacaatggtcaccggtttggattgttcgcgcataaagcgtgacacgccggtgatagtgccggttgttcccatgctggagacaaaatgggtaatacgcccgccagtttgctgccagatttctggcccggtagtggtgtaatgggcgtaagggttatcgggattattgaactgatcgagcaactttccttcgccgcgattcgccatttcaagcgccagatcgcgtgcgccttccatgccctgttctttggtgaccagaatcagttctgcaccgtaggcacgcatcgccgcacggcgttcctggctcatgttgtcgggcatcagcaatttcatgcgatagcctttaagcgccgcaatcattgccagcgcaatgccggtgttaccactggtggcttcgatcagcacatcacccggtttaatctcgccgcgcttttccgcctcgacaatcatcgaaagcgccgcacggtcttttaccgatcccgccgggttattgccttccagttttaaccacacttcactgccgttatccggcgccattcgctgcaacttcaccagaggcgtattgcctattgtttgttctaatgtactcacgatctctgtccatacgtggtgttgcctgatgcgacgcttacgcgtcttatcagacctacaggttacaaaaccttgccattaaaaagcccggatcgcgggaagcgcctccgggcgtttaacattcactcaacctatcaggcgctttgtgcgagagcaagttcctcatcgcgggtttcaatacgctcatcgccgttatacagccgcgcatgttgcagaccaacgtataaacgatcgccacgctgcggggcatcgtcgccatgcatcacgaccgtcagcggttcgttgtaccaccccagcggctgcaccactaattgggtgtagtgacctttcgggctggcttccagtacctgtacgggtagcggcgaatcgaggctggtacggcggctgatatccacttcccacgggcgcaggaagagatccaccggcccctgatacgcgggggtgtatcccagcggccagcgatgtgcgccaacgtggaactgcccgccgcgaatggttccctgcaggcggtttacctcgcccataaactccagcacaaaacgagtcgccggttcacgccatacctgatccggtgcgtcagcttgttcaatattgccctgactcatcaccactacacgatcggctacttcggtcgcctcttcctggtcgtgggtcacgaacacgctggtgaatttcagttcttcatgcagttgacgcagccagcgacgcagctctttacgcacctgcgcatccagcgcgccaaacggttcatcaagcagcaaaatttgcggttccacagccagcgcgcgtgcaagcgccacacgctgtttctggccgccggaaagctgcgccggataacgatccgccagatgcgcgagctgcaccatctccagcaattttgtcactttcgctttgatcgccgccgcattcgggcgttcacgccgtggcaacaccgtcaggccaaaagcgatattgtcaaacaccgtcatatggcgaaacagcgcgtaatgctggaacacgaaaccgactttacggtcccgcgcgtgcagacggctcacgtcggtaccgtggaagcgaatatgcccgctggtttgatgctccagcccggcaataatgcgcagcagcgtggtttttccggaaccggacggccccagcaacgcgaccatctgaccagaaggaatatccagtgagatatcgttcagcacctgggtgcgaccaaacgacttcttaatattggcaatctcaatgctcatgatgttcctcctgctgcgcgcgtttttcctggttctccaggcgccactgcaacatactctttaaaaacagggtgataatcgccatcagcgtcaacagcgccgcggcggtaaaggagccaacggtgttgtagtcctgctccagcaattcaatctgtaacggcagcgaaagtgtttcgccgcgaatcgagccagaaaccaccgacaccgcgccaaactcgccaatcgcgcgggcgttggtcagcaccacgccgtaaagcagcgcccagcggatgttcggcagcgtgacgcgacggaacatctgccagccggacgcgccaagcaaaatcgccgcttcgtcttcctggctgccctgacttaacattaccggcaccagctcgcgcaccacaaacggacacgtcacgaagatggtgaccagcaccatacccggccaggagaacataatttgcagattatgttcatccagccagccgcccagcgggccgttagagccgtagaacagcagatacaccagaccagcaaccaccggcgacacggcaaacggaatgtccagcagcgtcagcaatagctggcgtccggggaagttaaagcgcgtcaccagccaggccagcagaataccgaacaccaggtttaccggtacggcaatcaacgcgatcatcaccgtcagccagatggcgtgcagcatgtccggatcggccagattttgtaacaccggcatcagtcctttgctgaacgcctgtacgaagatataaatcatcggtaccagcaggatgaacgccgataccagcatcccgatgccaatcagaaaccatttgccccagttaatcgggcgcgcgtcataacgcttcaattgtgtcacttccgccattaatgacctaccacacgccgaccaaagcgactttgcagagtgttaattgagaacagcaacagcagcgatgccgcgaggatcaccgaggcaatcgcgctcgccgccgggtaatcaaactcctgtaagcgaacaaagatcatcagcgacgtcacttctgttttccaggcgatattcccggcgataaaaatcaccgcgccaaactcaccgaggctgcgggtaaacgacagcgccacacccgccaccagcgccggagatagttccggctgcaccactttgcgaaaactctgccagcgtgttgcgccgagcgtttctgccgcctcttcatattccgggcctaactcttccagcaccggctgcacggtgcgcaccacaaacggaatgctggtaaaggccatcgccaccgcaatccccagccaggtataggtgactttgatatcaaacttcgccagccattcaccgtaaaaaccgttcacggaaaagagcgaggccagcgttaaaccggcgactgccgttggcagcgcaaagggtaaatccatcagcgcatcaagcagcgtgcgacccggaaagcgatagcgggttaagatccacgccatcagcagaccgaaaacgccgttaaaaatcgatgccacaaacgccgacagcagcgtcactttataggctgcgaccacctgcgggttggtgatcacctcccagtactgcgcccagctcatctgggccagttgcatcaccagcgcggagagcggcagcagcaaaatcaggcacacaaacagcagactggtgccgaggcttaaggtaaagcccggcagcacgcgtcttgaagaaacggcaaacattacttacgccccgccgctaacagcttgtctaactcgccgccgctggtgaagtgggttttcatcacttccggccaggagccaaatttatcttccacgcggaacagctcggtctgcgggaatttatctttcagtttgcccatgacttccgggttatttacgcggtagtaatagtcggtgatgatggtttgcgcctgcgggctatagagccagttcaggtaagcttttgctgctttttccgtaccgttggcctgcacatttttatcgacccacgccaccgggaattccgccagaatgttggttttcggaatcaccacttcaaagccctgcgcttcatactgtttacggatgttgttcacttccgactcgaagctgatcagcacatcgcccaggccgcgctcggcaaaagtggtggtcgcgccacgaccgccagtatcgaacacttcaacgtttttcaggaactgggtcataaactgttcggttttggctttatcaccaccgtcggctttgtccgctgcgccccatgccgcaaggtaggtataacgcgcgttacccgacgttttcgggttcgggaaaatcagcttcacgtcagagcgtaccaggtcgttccagtcgtggatattcttcgggttgcccttacgcaccaggaagcccatggtggagtagaacggcgagctattattcggcaggcgcgactgccagtccgctgggatcagcttgcctttatcgtgcaggatttgtacgtcggtcacctggttataagtgacaacgtcggcttttaaaccctgcaaaattgccagcgcctgttttgatgatccggcatgagattgtttaatcgtcagtttgtcgccaccgttatcttttgcccattgttgctcaaacggcgggttcagggcggcaaacagctcgcgggagacgtcataagaactgttcagcagttccgttgcctgtacatggcccgccagtagcagagaagcaaccagcacgagtgagttctttttcagtaagttaacggccattgcgcacccttataaatttaatgactttctaatagccatcatatttataacggacgtgaaaggagtaacggttttatataccgtttggtgatttggaagttgaaaagggaataagacgaaatcctccccacaaatgcagggaggaaacagaggtgaatcagatgccgacgctaaccgtctccggcagtgtgctgccgccatcaatcacattctgtgtaccggttaaatagctggattcatccgatgcgaggaaggccgccagttcgccgacttccagcggatcggcgaggcgacgcatcgggattgctttcgccatttcagtcagcaccgattctggatcttccgggttcgactggcgggcaatgctttccgccattggcgtgcgaacgtatccagggcagatggcgttaacgcgaataccagactgcgcgtactccaccgccagcgatttagtcaggccaacaatcgccgctttcgttaaggcgtacgccgtttcgcccgggtctgccaccatatcgccagtgactgaagacatcatcacaatccggccatctttgcgggcaatcatctccggcagcaccgccttcgtgacgttccatacgccttttatattgatatcaatatggaaatcgcgatcttcatcgctcatatcaaggaaactgcccagacgacaaacgcctgcgttattcaccagaatatcaatgcgcccttctttttccttagcgcgcttaatagctgcggctaccgacgccgggtcacgcacatcggcgacaaccgccgtacagcgatgaccacggccacacagttcgtccgccagcttttcgatctcaggggagatatccagcaagattaggtttgcgccatgacgcgcaaaagttctggcaattccttcgccaattccctgcaatgcgcccgtaatcagtgctgtcttgcccgtgagtttacccattttaatgctctccttgttaatacagagcgttacactccattccctctgaaaatacaggataaacaaaatattgctgcggatcagctcactaattaaggaaaatctcaatttagtcgctgctttatgcagcacctcaagcgttacgtcagcgcgcaatcattttcagtgacatcacatgagtaatattcggacttaatgattcctttgtgtctatcaaatcgggatatatgatcccatttatctgcaattatttgatcgcaaatattaaggtcaccaccgatgcaacttgaaaagatgattaccgaaggctcgaacgccgcctcagctgaaattgaccgcgtatcaacgctggaaatgtgccggattatcaacgatgaagataaaaccgtaccactcgccgttgagcgcgtactgccggatatcgccgcggcgatcgatgttatccacacccaggtaagcggcggcggccgtctgatttatctcggtgcgggaacatccggtcgtctggggattctggatgccagcgaatgtccgccgacctacggcgtgaaaccgggcctggtagttggtttgattgctggcggcgaatatgccattcagcacgcggtggaaggcgcagaagatagccgggaaggtggtgttaatgatctgaaaaatatcggcttaaccgcgcaggatgtggtggttggtattgcggccagcggacgcacgccgtatgtgattgccgggctggaatacgcgcgccaactcggctgccgtacagtgggcatttcctgtaatccggggagtgccgtttcatccaccgcagagtttgctattacgccggtagttggtgccgaagttgttaccggttcttcgcgaatgaaagcaggcacggcgcagaaactggtgctcaacatgctctccaccgggctgatgattaaatccggcaaagtgttcggcaacctgatggtcgatgtggtcgccaccaacgaaaaactgcatgtgcgccaggtcaatatcgtcaaaaacgctaccggatgtaatgccgaacaagcggaagcggcgttaattgcttgcgagcgcaactgtaaaacggccattgtgatggtactgaaaaatctcgatgccgatgaagctaaaaaatgcctggatcaacacggcggttttattcgcaaggctctggaaaaggaataacccatggctaaagagatcagcagtgaacttctgaacaccattcttacccgggtcggcggaccgggaaatatcgccagttgtggtaactgtatgacgcgcctgcgtctgggtgtacatgacagttcattggttgatcccgatatcaaaacgctggaaggcgtgaagggcgtcattttgaccagcgatcaggtgcaggtggtttttgggccaggcaaagcgcatcgtgccgcaaaagccatgagcgagctgctgggcgaggcaccggtacaggatgccgcagaaatcgccgcccagaataaacgccagttaaaagccagacaaacttccggcgtgcaacaatttctcgccaaattcgccaccatcttcacgccgctgatccccggttttattgccgccggtctgctgctggggatagcgacgttaattgccacggtgatgcacgttacggcagatgctcagggcacgctacccgatgcgctgaattttatgaaggtgttcagcaaaggcctgttcaccttcctggtcattctggtgggctataacgcggcccaggcatttggtggcacgggcgtaaatggcgcaattatcgctgcgctctttttgcttggttataacccaactgcaaccacgggttactacgccggatttcacgatttctttggtctgcccatcgatccgcgcggcaatattatcggcgtgttgatcgccgcgtgggcctgcgcccgcatcgaatgcatggtgcgccgctttatgccggacgacctcgacatgctgttgacctcattaatcaccctgctgatcaccgctacgcttgcgtacctgatcattatgccgctgggcggctggctgtttgaaggcatgtcgtggctgtttatgcacctgaacagtaatccgctcggttgtgcggttttagccgggctgttcctgatcgccgtggtatttggcgtgcatcagggctttattcctgtttatctggcgttaatggacagccagggattcaacagcttatttcccatcctttcaatggcaggcgcaggccaggtgggcgcggcgctggcgctctactggcgggcgcaaccgcacagtgcattacgcagtcaggtccgcggggcgattattcccggtctgcttggcgttggcgaaccgctgatttacggtgtcaccctgccccgcatgaaaccgtttgttaccgcctgtttaggcggcgcggcgggcggtttgtttatcggcctgatagcctggtggggtctgccgatgggcttaaacagcgccttcgggccgtctggtctggtggcgctgccgctgatgacttccgcgcaaggcatccttccggcaatggcggtttacgctggcggtattctggtggcatgggttagtgggtttattttcaccacactctttggctgccgtaacgtcaatctggactgattatgaaacggacaatgctctatctttctctgctggctattagctgtagcgtcagcgccgcaaaataccctgttctgacagaaagtagttgatcaagtgtatgcggcgttaaagcagtaataaaaaggccagtcagttgtgttactggctggcctttaatcaatgaatcagaaacgcttacagcgccatcagcttgtccagcgacggtgcgaagtaatagccgccagtgaccggtttggtgaaacgcaacatcgcatcacgcttaccatcagtatcgccaaacatgctcagcaattgctgctcaatgttatgcagacgcgcgcagtaggcgcagaagtacagaccgtgagtgccactggcggtgccgtacggcaggctctgacgaacaatcttcagccctttgccatcttctttcagatcaacgcgggtcaggtgagaggtttccggacgttcgtcgccgtcaatctcttcgttggcctctttggtgcgcccgatcatcatctcttgatcgtgaacgctcatccgattgagctgcttcaggttgtgctcccaacgctgcacaaacacatagctgccgcccgcatccacgccgtctttgataacagccacttcgcggcgcgtctcttcacccgccgggttttctgtaccgtcaacaaagccgctcaggtcacgctcttcaacccaacggaagccgtggatctcttctttcacttcaatgcagtcaccaaaggcttccatcgccgcctgagcgacagagaagttcacgtcgtgacgcagagaaagaatgtggatcaacacatcgaactgggtcgtcggtgcaagacctttaccgtagcccggaaaatctttcagctcttcagccccaacgccgccgctcagagtgcgccaggtattgttaccaaaggcaaccaccgcaccaagatgcgcgtccgggaatttcgcttcaaaagttgccagtttgtcggcaaatgttttactggccgcacgcagggcgtcaacttcccctttcacgttggcttcgatccaaatcgccgcgcggcaatgttctggcaaaatgccactctgaacctgagacattgttcctcctgaaaataataatgccacgcaatccgtggcattgttgggcgctattttacgtgttttttcgcggcggcggtttgttcagacgcaaattaacgccgccagataattttactgactttccagtttttcagggtatcgtccgaaggcattaacccttcaggaccactccattccccgctgaactggtagctaatatgttgactgccttcggctttacattcgacggcacgattatcatcactgtcggccttttggcaattgccaaatgctttgctgtaaaggtcactaaacggtgtaccgattttaacaccggtgtcagcaggaatatcgctatccagcacatcaatgcggctgatcgtgccttgatcgccgttaatcaccatcgccacgttgtcgcctttcatcacttcaaaaaagcgcaccacgttgccgttcgcggttttcattccgctgcgcaggcgataatcgccatcaagcgcatcagcaatggcttgttcttgcagtggtgtggacgccgttaattcacccacgccctgctcgctcactttggtggatgatccaaaccagttccacgggttagcggccgaccagttaactgacgacatcgtggaacagccggtcagcatcaacggcatagcgcataacattaaacgcagcgatttcatgtcacttcctttggttattcaataacgttgattggagtgcaaattcaccaaaaagtgccgttattctttttcttcattaaaacaagcgcgtaaacgtcgattggtcagcagccagattaacgccacgatatccgccactaccagcgccagaccgataccgctaacggattcaccgttcagccacagccacggttgccaacaaagtaaaaccacttgcgccaacagcaacagaaaatagagcacatgccagatacggggaaatgaagcccgccgaccactcagcaaaaatgccagcaccgccggaataccgggaatcaaccccagccagaaattatcgtgatcgggataaaacagatttagcagcgcagtaccctgctcgcgcgacgctccggcaatgacaaacagcacccaggttcgcgcctgaagcaatagcacaagccagaagagcaagggtaaacgcaggcgaccgtgcgcatcataatggacaggatgaaactcagtactcttcatcttcaatcaaacgcttacccagactcagcacgtcggcgtgttcatatcccaggcgttcatacattccgagcaccatgtcgttatcttccggcacgttgatctgaattttcggacagccgcgagcaatcagctttttctccagccgattaagcaacgcattagcaatcccacgcccacgaaactcgggatgcacgccaagataataagcagacccgcgatgcccgtcataaccgcccatcaccgttccgaccacttcaccgttcacctcagcgaccagaaacaaactgacgtcatggttcatcttacgctcaatgtccatttccggatcgttccacggacgcagcaagtcgcaacgctcccaaagggtgatgacctcttcgaaatcttcctggcgaaatacgcgtatctccatggtattcgttacctttttgcgggttaaaaggctgattatggcgtgaacggtcgaattagccaatatctgacgaaaatcggttgaaaaagtggcataatggggagttgtcaactattgaaatgaaaagtaaaacaattctcaacagcaaaccgtcgtaacggattacgcgatacgatataacatctggaactttattattacaactcaggccgtatgagcacttttaaaccactaaaaacactcacttcgcgccgccaggtgctgaaagccggtttggctgccctgacgttatcaggaatgtcgcaagccatcgccaaagaagaaccgttaaaaaccagtaacggacacagcaagccgaaagcaaaaaaatctggtggcaaacgtgtcgttgttctcgatccaggccacggcgggattgataccggagcgatcggacgcaacggttcgaaagaaaaacatgtggtgctggcaattgccaagaatgtccgttccatattgcgtaatcatggcattgatgcgcgtttaacgcgttctggcgatacgtttatcccactgtacgatcgcgtggaaatcgcccataaacacggcgcagacctgtttatgtcaattcacgccgacggttttaccaacccgaaagctgccggtgcttcggtatttgccctctctaaccgtggggcaagtagcgcaatggcgaaatacctgtctgaacgcgaaaaccgcgccgatgaagttgccggtaaaaaagcgactgacaaggatcacctattgcagcaagtgctgtttgatctggtgcaaaccgatactattaaaaacagcctgacgctcggctcgcatattctgaaaaagattaagccggtgcataaactgcacagccgcaataccgaacaagccgcgtttgtggtgttgaaatcgccgtcggttccgtcggtgctggtggaaacctcgtttatcaccaacccggaagaagagcggctgttaggcactgcagcgtttcgccagaaaatcgccacagcgattgccgaaggcgtgatcagttatttccactggtttgacaaccagaaagcacactcgagaaagcggtaagtgatgaaacccgacgcacaccaggttaaacagtttctgctcaaccttcaggatacgatttgtcagcagttgagcgccgtcgatggcgcagaatttgtcgaagatagctggcagcgcgaagctggcggcggcgggcgtagtcgggttttgcgtaatggtggtgttttcgaacaggcaggcgtcaacttttcacatgtccacggtgaggcgatgcctgcttccgccaccgctcatcgtccggaacttgccgggcgcagtttcgaggcgatgggcgtttcactggtagtgcatccgcataatccgtatgtccccaccagccacgcgaatgtgcgcttttttattgccgaaaagccgggtgcagagcccgtctggtggtttggcggcggcttcgatttaacccctttctatggttttgaagaagacgccattcactggcaccgcaccgcccgtgacctgtgcctgccatttggcgaagacgtttatccgcgttacaaaaagtggtgcgacgaatacttctacctcaaacatcgtaacgaacagcgcggcattggcgggctgttctttgatgatctgaacacgccagatttcgaccactgttttgcctttatgcaggcggtaggcaaaggctacaccgacgcttatttaccaattgtagagcgacgaaaagcgatggcctacggcgagcgcgagcgcaattttcagctctaccgtcgcggtcgttatgtcgagttcaatctggtctgggatcgcggcacgctgtttggcctgcaaactggcgggcgcaccgagtcgatcctgatgtcaatgccgccactggtacgctgggagtatgattatcagccaaaagatggcagcccggaagcggctttaagtgagtttattaaggtcagggattgggtgtaactccctcacccccactcccgcatccgctgatgcagcgtcagtgacggcttctcggcaaacagttgctgataatccgtggcaaattgcccaagatgccagaatccccactgcatggcggcgtcttttaccgttgtgctttgtgaccacggacttatgagttcgcggcgcacggcgttcaggcgaatacgtttcagccacgcgttcggaccaatgcccaaaatggcgtgaaacgcgttttgtagcgtgcggcggctgacatgcagttgattacacaagtccagcaccgtcaccggttcggacatgttttccagcacatattcacgggcgcgggaaagcaatcgacggtaactctgatgactgatgctttccgccgtcatcatcggctgcgcttcttccagcatcgcccccatcgccattagcaaattatcccccagcacttttcgcactgcaggctgatggagattttccgggttctcgcaaaacgtcgccagcgcctgttggacaaagccccacagcgcggctttatgctgctctttcacttccagcgccgactggctacgcagcatatgtaatacccgatccggattatgcaaaaagttagcctgacgagtgatgacatcttcagaaagcactacgccaaggatcgtgtaatcgtccggcgtacttaattcaaactcggttccaccagggcgcgtcgcaatttctgcacttcccagacattgcgaaccgataaatccctgctcaccgcgcgtcgccggaatgccaaaccagaacgagttcggccagaccaggcacgactgacgcagcgccagaccagtgtattcacgaaaaacctgaatatcatcgagtagaatttccgtaaattcaccatgaaacttgcccggatgcagctgatcgtaaatctgctgccaggcggtaattgtcaaagcatgttcatagacgtccgttgtctgtcgttgatgaacattatccacttcgaccttcggcgtgagcttcaggttttcgggtaagggttcatgataaagatggtgcaaattggctgtacgggtctttttcatgatgttaatgccgggtgttgtaggacacccggcacctccgacaggttaatggggcttgagacggtaacgactactgcgtttacgtaacgtcccggcagaaaagagctgttcgagcgcatttctggctttttccagcggccagccaaagtgggcagccacttctcctgccgtcattccctgacgtactgatgttaacagcgccaacaactcgtcagcagattccgcgacgataactggcgcgtcgggttcctttacgggttgcttcggctggcggttaaagccagtaagcagccactgggtgtcatcgtctggccgaccgatctccttacggctgatgacacgcccggtacgcatcgcggcagcacaacctgcgtccagcgccgcacgacacgccgccagatcgccttccaccaccagcgttaggcgaccagggtcaagcacttcgtgactgagcagacgaacgttagctgctttgagcatggcatcagctgcatctatcgcggcgaccatgccgtccacttccagcaatcccagtgcattgatcatcggcaacctccgttacgcacgctggattggattacgcgcgatttccagcactgcatcggtaaaggcgttacaggctgctttacacgcggcctggctaccggttaaaaatgctgccgagtagttggtttcagacggtggcgggacataggtcaccagctgcacgtcggcagatttcaacgctgcatcaatgccgtaggtcgcttccagcggcggtgccaccagatacgccatcggatcgccaagcgtgatcccggcggttgatgagagataagaaccggtacgcgaaactacatgtgccaggaaggctgtgttttctgcgtcattagcccactggaaagcagcgccattttcaatatttgcaaccatcgcatccagaccagcacgcacttccgccgggtttggtccaccaagcataatcagcacctcaccggcagtcggtgacgggccgtgtgcagcgcccgcatacagcgagcgaccatataccacttcgaccatcgcctgcttggtcgcttcgtcagccgcaatgtaggtgacgtcatctgaatcagcagaaatcagcccgaggctacgaatatgcggcggcaatttcagttcacgtgcaaattcggcgttaacggaggcaatcacccgcatggcggttaccgacggtcgaatcaaatctaaagctggcatgatgcctccttatcgggtcatgttgatgccggatgctttctgctccagcatacgtttcgccaaatccacaatgacggctgcggcttcaaccggcggcgtgccgccctggtgaatattagagatacaggtgcgatcggcctcaacggtggtcgccatacgcggcgagtaaacggcgtagcaggagaggctttctgactgccccaaccccggacgttcgcccaccagcaggatcactactttcgcgcctaggatctcaccgatctgatcttcaatcttcacgcgaccataacgtacaaagaatggcgtaccgactttcagcccggcttgcttcaggcccgccatcagcggcggcaggatctcttcgtagttcacggtgatcgcatcagttgacaggccatcagaaataacgacctgcacgtccggattagcaacacactgtgctttcagcgcttcaacagcttctgcacacaggcggcggcccatatccggacgagtcaggtagagatttttgtcgctgatttcggagcggacttccagcaagccctgcgctttcacccactcttccggtacttctttcagaacggtatctttcgaacgagagtgatcggccaggaaacgcagcaacgcctgggtgcgcggacgcggaccggcacgaccggtacaaacgcgggccacggtgctgcgacgcagttctgttaatacgtccgcgcgatgtgggttttccacaccaatccacgcttttgcttccgcagaacctaaatccagcgcgcagctttccgaggtcaccggtgccgcacagttggtggtggcgcactttgcttctgacggcgcgggggccgtttgtcccattgacgccatcacactgcgtacaatttcttcaatctgtttttgatccatgatgtgttatctccgcgtcatcagaagaacagtgacggatcgcccgcccgtttggtcaggcgaccgtttgccataatgcccatgctttccagccagcgttcaaactccggtgacggacgcagattcagtaactgacgcacagtggcagtgtcgtggaatgcggtggtctgatagttgagcatgatgtcatcacccagcggcatccccatgatgtagttgcagcctgcggtggcgagcaggatcatcaggttttcgttgaggttctggtcagcgtcagcgtggttggtgtagcagcagtcacagcccatagagatgccgctcagcttgcccataaagtgatcttctaagcccgcacggataatctggcggtcgttgtagagatactccggcccaataaaaccgaccacggtgttgacgataaacggatcgtaatgacgcgccagcccatagttacgcgcttccatcgtcacctggtctgcgccgaagttagcgccagcggatagcgccgagccttgtccggtttcgaagtagagacagttttccccggcgatacggttgaactccgcgcccactgcgcgtgcttcatcgagcatcgccagctctacgccaaactctttcagccctttttcgctgccgcagatactctggaaaatcagcccgcctggtgcgccacgacggatcgcttcgatctgggtggtgacgtgcgccagtacgcagccctgagttgggatgttgaatttgtcgatcacgccatagatggtatccaacacgcggcttaagttttccacgtcgtcagtcaccgggttaacgccaatcaccgcatcgcccaccccaaaggaaagcccttcgtagatttgcgcggcgatactttgcacgtcgtcacgggtatcgttcggctgcaaacgggcgctaaaggtgcccggaataccgatggtggtattggcctttttgatcaccggcattttcttcgcgccgtagatcaggtccgcgttggagcaaatcttcgctaccgccgccaccacttccgaggtcagccctttgcgggtaaaggcaatgtcgtccacgctgatttcatcgctcagcacatactcacgcagttcgctgatgctccagtttttaatctggttataggccgtttcgttaacgtcgtcctgaatcagccgcgtcacgcagtcatcttcataggcaatcaccggattattgcggatgtccgctacggtcatttccgacaacacctgctttgccgccacgcgctcctgtgaacttgccgcagcaacgcccgccagcacatcccccgaacgcagttcgttggctttagccagcacctcttttacatccttaaactgatatacattgccgaacaatgtggtctttagtttcataagtcgttccctcaggaaggaaatgcgagtgatttcaccgtcaccggcacaaccgatccgccaaaaagaggcgtaccaatgtcgatatagtcccccgcgcggacaatcacttcgtcaatgactgccaacgggagttgttgtagctgtgggcgcaacaacatgcccagagctttaccaaagtcctgcccggccaccaccagcaggggatgcggattcggaaaacgcgcgacgaaatcgaccagcgcgttgatgaccgtcagtaccgcggcgtaacgcacaggcagcgaggcgggaagcgccagcacgtacgcgtcagttttggggcaaagatccagttgaatcagcgcctgttgccaggcactgaccagatccgtttcatcaatcgggatcgccaccggcaaattgcgcagcggcagttgtacgccctccagccagattgtgctgccagagagcgaaagggtatgagcacccgcgccaatcaccgtggcgcgcacggtttgcgccggaaactgcacgttcatctcacgcagacgcggatggtcatgcagcgccgttgccagaagcgggcctatatcggcaaaacagaacgggtcggcgggctggtggcgataacattcgcctaccccgccagaaagcgtaatgatttcgggcgtaacacctgcgggcagcaaatcggtttgcatcaatgcctgcgcgagcggcgagagcgttccgtcaatcacttcgacaatcagctctgccatccggcgggtaacctgcaccagctgcccgccggtcagcgaacgggcgtcagtaccggcaccgaagcactcatccacaatcatctgccccggtttatgagcgtaaaccacgcgcccctggctgtcggtttccagcaggcgaccgccgacgttgaggcaggcagtgccgctgatttttccggcatcgaacagggcgtagttcgcggtgccaccgccgatatcgatattcagtacccgacacagccgttgttcagaaagggtttgcgccccggcaccgtgtccggcgatcacggattcaagatgcggcccggcgctggcgacgacaaaatcgcccagcgaccgggagagcgccatcaccgccgggcgagcgttgcgggtttttgcgctttcaccggtgataatgatggcaccagaatcaacgctttccggcgcaatgcccgcagcctgatattgctcgaggattaaggttttcagttccgcttcttttaaaccaccctgtttatcgacaggggtaaagaacaccgggctttgccagctaatttcgcgtttgatgaattcgtagcgcggcacctgcgacaccgccgcacggttaaccagctccaggtgggagaagatcacctgggtggtggtggtgccgatatcgataccgacgctcagtagctggcgagtgttcacgattgcgcctccgcttcagttttagccgcggtcgcgtcttcttttggcaccagcatcatcgccacgccaattgccgttacgccgccgatcaatttgccgacaatcatcgggaagatcatggcgttcatgttggcagcggcgaagcctaaatggtcgcccagggcgaaagcagcggaaacggcgaaggcgcagttgatgactttgccgcgggtatccatctgcttcatcatgccaaacatcggaatgttgttggcaagcgttgccaccatgccggctgccgcgatattgttcatattcagcaccttaccgacgctcatcagcggtttttcaaaccagcgagtcagcagcagtaccattggatacgcccctaacagaacgcaggagatcgagccgataacttcaatggcgcgcatcacttcaccgggtttatcgccaggggccataaagataggatcaagacccgggatcagttcccagccaaggaggaatttcactaccgcagcggcaagaccgagggtgatcaatgcaacgaggaatttggcgaagatctggaagccgttgatcattttttccgggatgaatttcagccccagcgccaccagcaccgcaacgataagtaccgggatcatgttcatcaggatcagcgcaaaggtgaattcaacaggctggccgttgatctgcacaccggagtacatcgctaccagaccaccagcgatacagccaatcggaatggtcactatgcccgccagcacgccgagcgccagataacgacggtcagaaggttcgataatgccgagcgccactggaatggaaaacacaatcgttggccccatcatcgacccgaggattaacccagagtatagccacgctgctacgtcaccgcccgccagctctttggcgaggaagaagccgcccatatcgcacgccagcagtgttccggcgaacattgacgggtttgcgccgagcatttcgtaaaccgggataatcaccggcccgagtacgtgggccagtaccggtgccagcgcggtcataccgaccatcgccaggcccagagcgcccattgccataaagccttcttcaaactggccgccggccccttcgatacttttgccgaacttaccgaggaaacgagcagaaccgccgaactgcgacaggatcctgtctacggcagctatcagcataaagaacatcatgatgtacatgatgatttcgttaattcccatcgcctttactccctgttagttgttatttattggcggatgcggcgtgaacgccttatccgccctacatgtgcaatcccgtaggccagataagacgcggcaagcgtcgcatccggcaattgcaccgcgccactggcggatgcggcgtgaacgccttatccgccctacatgtgcaatcccgtaggccggataagacgcggcaagcgtcgcatccggcatttattgcgccgctgcgtacaggccgacaatctgctccaggctggcggtacgcgggttactgcgcagacaaatatcttccagcgcggcctgcgcccatgcgccgtaatgcgcagatgtcgcaccaacatcgcccagtcgtttaccaatcccaacttcagcaatcagctcacttaccgcgttaatagcgtcacgatcgtcggattttttagttcgcagcgcccgaccaatctgactaaaccgatcacgacaaaccatccggttaaattccatcaccgttggcaacaacatggcgttcgccagaccgtgcggaatatgcagcgccgcccctggctgatgcgccatcgcgtggcataacccaagcccggcgctggaaaacgccattcccgccatacatgaagccagcaacatgctctcgcgcgcggcaaggtcatggccgtagcccaccgctttcggcagtgatttgccaatcatcgcaatggcaccaatcgccaggctgtcggtaaacggtgtagcgttcagcgcgctgtacgcttcaatggcatgggttaacgcatcaatgccagtcatcgccgtgacatgcgacggcacgccttcggtcagcgcagcgtcgagaatcgcgacatccggcatcagcgaggcatgggctaacacctgtttgcgcccgcttaccgcatcgataatcaccgtcacgttagtcgtttcagagccggttccggcggtcgttggaatggcaatcaacggcaggcgcggttgcaggacgctggtttctgacatttctgccagcgtgctatcggggttcgtcaccagcaacgcaacggctttcgccgcatccagcaccgagccgccgccaaacgcgatcaccccgtcacaacctgattcacgcaactgcgccacggctgcacacacgtcggtgatgcacggttcgcccaccggacatggccagagcgtcatggcgatacctttaacggccaggctacgtgtcagcccggcggtcatccctgcctgatgcaaaaagctgtctgccatcacgaacagatgtttcaacccacgcgtttgcgcttgctgcccacaactgctcaccgcgcccggaccgcaaagcgtcaccggtggaacgctaaatgtttttacccgttgcagattcagggtatcgaacgcctgaaaaagcgccgtttgcaattcactttgcatagatcccctccgctttctctcgcccactactggcgattgccagcggggtcataaacaaactgtgctgcggtaaatgcacctgtaacgccggaaattgtttgcaaaacagcgcagctacgcccggttgcatacaggaaccgcccgccagccataaatccgtaatgccctgcccttcaatatgccgggccacaatgtccgccattttttcgtacaccggtttcaccgcgggccaaatctcgtcaccgtgaccgcgtttgtactgctctgcctcttccagcgaaatacggcgatttccggcgagagtcagagagatgtgatgtccgccggtggcttcatccgccgagtacgtcaccttgccctttttcacgatggcaataccagtagtgccaccgccgatatccactacaccggcgttgtccagttgcagcagatccgcgactgcggttggctcatccagcacatggctcacttccagtccggcagactccagcacgttgatggaaatacgcgggtccgtacctggaggaaaagaggtcgccgcatggctaaaacggcgaccgaattgctgctcgagggtgtcgagatggcgtcgaacaatggtgaccgcaccgaagaaatcccagacgatgccgtcgcggaccacatcagcccagtcgaggcataccgccaccggctgaccgtcgcggtcgacaaccatcgacaccacatcgcaagtgcccagatccacccccagccacagcggagattccgtcgcggcaggcgtctggttacacagcgttgccgccgtttgcagacgtggggtgagccattgttcatcgtgcgccatcggttactccttaaacaatgcgaaacgcatcgactaatacacagcgacgcagacggacaaacgtccgcgcgctggttaccccttcaccggttggcgtggtgatggtcatcgtggtccagccttccccgcccagccccagcccggcaatacacggtccgttcttaacgaaaatgctggtatcaatggcgttcgccatctggttcatgttttcgatattgcgcgagtgcattgccgccgtgtggtggcaaccgccttccagtttcaccgccagcgcaatggcatccgccacgttggcgacgcgcacgacgggcagcaccggcatcatcagttcggtcacggcaaacggatgttctgcggtggtttctacaaacagcagtcgcgtttctgacgggacgttcaggccgattgccgccgcgattttcgccgcatcgcgaccaacccagtcacggctgacggtgccttttccgcgctcgtcgatatttttcagcaacaccgattgcagttgctgcgcctgctctgcggtcagtttcaccgcatgctggccttccatcagacgcatcagttcatcggctacgctatcaacaacaatcagtaccttttcgtcggcacaaatgatgttgttatcgaaagaagcgcctttgacgatggactgagcagcacgggcgaggtcggcggtttcatccaccactaccggcgggttaccggcacctgccgcaatcaggcgtttattggtgtgtttgcgcgccgcttccactaccgcttcgccgccggtcaccaccagcaggccgatacccggaaacttgaataagcgttgcgcggtttcgatatccggatttgctacggtaaccagtaagttttccggcccgcctgcggcaacaatcgcctggttgagcagcgtgatcgcccgctgggagacttttttcgccgccggatgcggggcaaaaatgacgctgttgcccgcggcaatcaggctgatggcgttgttaattacggttgccgccgggttagtggaaggcgtcaccgaagccaccacgccccagggtgcgttttcaattagggtcaggccgttgtcgccagtcagcacttgcggagagaggcactcaacgcctggtgtgccgcgcgcctgagcgacgtttttggcaaatttatcttcaacgcgccccatgccggtttcactgacggcaagttccgctaaatctctggcgtgtttttcgcctgcttcacgaatggcagcaatggctaactggcgcattgccacgctttttaacccttgctgggcgactttggctgccgcaacggcgtcatccagggacgcgaaaacgcccatctcatgaacggcggcgggcggcgtgtcactgctttgcattttcagcagtaccgctttcaccacctgttcaatatcctgttgattcatgatgttctgccttatttgtggaaaatgacctgaccgccagacaccacctcatcgacgatgccaatcacgcacagatcgaccggtgacgtttcgcttttatgcgcctggcgggcggaactgccactcaccagtaacacccactccccggttcccgcgccaatattgtcgatggcgacggcgcattgcccgtcaggattaccttgtggatcaatcatttccaccatcagcaatttgtcatgcgccagtccgtgatggcgtacggtacaaacaatttgtccagtgacgactgccagtttcatacccgcctccgtggcgtatttcaggtaaaagctccccctaccctccgcggaaggtaaaatgaaaaaggagagagcgtgacgcccgaatcgacgtcacacagggtgattacaggttgctgctatcgcctttcaggccgatcgggaagacttcttccaggtcgccgtgcggacgcgggataacgtgtacagataccagctcgccgatacgctgtgccgctgcggcacctgcatcggtcgcggctttacaggctgcaacatcaccacgaaccatggcagtacacaggccgccgccaatctgcttaacaccaaccagcttgacgcgcgcagctttaaccatcgcgtcagaagcctcaatcagtgcaaccaggccccgggtttcgatcattcctaatgcttccattgtgctttcctctttatcagggtccagaacgggaccgttcattcaaccagtgtttgtaaactgctttcgcggttcacttctgtctgacgcggcacagctgccaccagcgccagttcgataatttcctgcacgctacaaccacgagagagatcgtgcatcggcgcggcaagtccttgtatcaatggcccgacggcacgatatccgccaagtcgttgtgcgattttgtagccaatatttccggcttccagcgacggaaaaaccatcacattagctttgccctgtaacgggctggcaggcgctttttgcgccgccacttccggcacgaaggcggcgtcaaactgcaactcgccatcgacaaccagctttggtgcgcgctcacggacgatttctgtcgcctgctggacgttggcaacgcaggggtgacgggcactaccgttactggaaaacgacagcatcgccacgcgcggttcttctccggtgatggcgcgccaggtttcggcgctggcaagcgcgatatccgccagttgtgccgccgtcggctgcggcaccacgctgcaatcggcaaagcccaacgccggaccgctgtactgtggcagcatcaggaaaatggatgagagcgttttacagcctggctgcaagccgataatgcgtaatccggcacgcagcacattcgccgtggaagagaggttgcccgcgatacagacatccgctttaccggcgctgaccattgcggcggcgaacatcagcggatcggtaagtttttccagcgcatccggcggcgttttttcgcccgcgcgggccagccagcgatgagcaaattcttcccgcattgcgaggttgccatgcggatctatcacctgtagcccgtccatcgccacgccgtgactgagcgcaaactgacgaagttcaaacggattggcgaccagaatgggcgttgccagaccttgttgatgtaaatattgcgcagctttcagcacacgttgatctaacgcatccggaaaaactactctggcgggcgctcgcaacgccagttcacgacaacgtttaataatcattgcgtttcccccagtcgttgttggatctgcttcaccgttagcggctgcttcgttacgctcaggatcatcatcacgtagaccgtgctggaaaggcggttcagcgcctgcaaaatgtccgggcgtaatacttcaaagctgcgggtgataaagacctgcgccgctacggtttcggtttcccgcactttggtgcgtaacagattcagcaacgccgcatcgcgcccgtggctggcttccggcaccagatgatcgtggtcgagataacgcagcggctggtgagaaagccgatgcagatcttcgtcagaaagcccgacaatcgcctgacagcccaacggttcccccagcgcatcggcacgcataatgttgccaagacgcgaacggatatccgccagccacggctgccacggttccgccagttcaatttgcagccacactgccagcgcaatggtgctgtcgagaacagcgcgaaaacccagacgcggatcgcttttggcgaccattttttccgccgacaggtgagtcagcgtatccggcttttttgctaccggctggcggcacagttcgcagcacgcctgcggatgttcatcgctactggtcagcccgtgaacgggctgcggctgctgctgttcatcgtcaacaaacaggcggccctgctcgtcaataaacttgatgcgcagatggcggctttccagtaactcccgggcagagggcgtcaggcgactgtccgcagggagatggatctctgcgccttcgctgagcgtatggttcgctcttagccatgcttcggtgatgaaatctttcatagggattgccagttagccggccaggcgacatacaggaatttcacgctggatgtcgtaccaaattcgatgctggagcctttcgggataaacatcacatcgcccgctttggcgatcatagtttcgccttcatggcgaacatgcagctccccttccagcaccatgtcgatttcgtcgtagttcagggtccacggaaagaaggcgttctcccactgcatgaaaccagcggccatactgctgccgtcgtctccggtcacgagatcagtcaagcctacgcagtgcggttgtgcgccgtcgaaacgaccaaacttgacgctgctgccatcaataactttgatgccgcctttgccggtcaccgatttaaagctcggctgcagtgcaccctgttccagcgactgtttttccttcatcactttttccatcagctgcgcgaccaggctttcggtaaactgaccttccggcagttgggcgataatggtttcacggatgcgctggctttcggttttatcggctgatgcgctggcgggaacagacgccgttaccgggatcgattcatcacattcggtgatggtaaaacccaacagatcagccacttcacgggcttccggggtaataatgctggcgcgcagaaccacggacattgccagtttgccgcgcgcgtgtgcttcacgaatatcattcgctgtgatgagttttttcacctgcttcctcctgtttggtgagagatgccagataatccaccagttgctgcacgctttgcgggtcgtggctgtttagctcgaaaatcggctcttcgaagcccgtctcaagcaataactttcgcgttgcggcgacgtcagcatctggcatgtccgttttactgatgacggcgatttgccgtttgctgacgccaatatccagcaacccggcaggcaaccgactttccgggtcattcgcgccgtggacatagatcagcatgtccacatcctgtagcgtggtaattaaggcgtgataccagcggggatggctaaaatattcacccggcgtatcaatatcgccattatcattaaattccacggcctgtgtttttcttgcgagggtataattcccctgcaacgcattaaataacgttgtttttcctgccccgacggtccccacaaacgcaattcgtttcatgaatgcctcgtattaacttttggtcatttcacaaagcgtataatttaataagcgtcctaaaccactgacggtttgtgataacgcttcttctactgcgcccaccgagccataaatcaccagcgcgccactaaaacgatcgagaaaaccgatatgcacatcggcggctttcaacgctaaatcaccggcgatcatcgccgtttctccgggagttagcgtcataatgccgattgcgcccgcatccggaacgccgattttcttcgccagttcctcgccgggatgcgcgatgagatgcgccagtgtgacctgtttaccgggcacaaattcctgaatgatgcgttctttatccatgagtcgccgcctgtgaaaaactttcgtgtatcgtgacaatttttcgtcagagtaaataacaaaattcggcaagcgcgtttaaaaggtgaggtagatcactaagaatggagagatatttgctgtggtgcataaactttcatatgcaacgcatgaatataaataaaataatatcgaaatattttatatactgatttttttattattcgcaaactcagtaataaactttactaatatattgcagctaaaccgcttaccctgaatattcagggtaagcgtgagagttaaaaaagaattacagcggttgggtttgcgcttcaaccacggccagcgccaccatgttgacgatacgacgtaccgatgcgatcggcgttaacacgtgaaccggtttcgccacccccatcagcaccgggccgacagtcacaccttccgagctggaaacgcgcagtaagttgtaactaatgcgggcagcttccatgttcggcatcaccagaatattagcggaacctttcaaagggctgtccggcatacggtcgttgcgaatcgcttccaccagcgctgcatcgccgtgcatttcaccatcaatcatcagttctggcgcacgttccctgaccagttccagcgcctgacgcattttgctcgacgacgggcagtcagaagaaccaaagttggagtgcgacaacagagccacacgcggctcaataccaaaacgacgaacagtttctgccgccatcaaggtgatctccgccagctcttctgcatcaggctcatcattgacgtaggtatcggcaataaaggtgttaccactcggcaacagcagcgcgttcattgcacctgcggtgtgaacgccatcgcgataaccaaagacatttttcaccacgctaaagtgttcatgataatcgcccaccgtaccgcaaatcattgcatcggcttcgccacgctgaaccatgatcgcgccgatcactgtcgggttactgatcagcgcacgctgcgcctgctcctgagtgacaccgcgacgcttcatgatctggaagtattcggtccagtactctttaaagcgcggatcggattcgttattgacgatctcaaaatcaacgcccgacttgatctgcaagcccagtttctgaatgcgcatttcgatcacgttcggacgaccaataaggatcggtttcgccagtcccagcgttaccagttcctgagtggcatgcagaacgcgcgcctcttccccttccggcagaactacgcgcttcggcgctttgcgagcctgggagaaaatcggcttcataaacaggttagttttgtaaacgaactctgtcagcttgtcgatgtagacgtcgaaatcagcaatcggacgcgtcgccacgcccgactccatcgccgctttcgccaccgcaggagcgatcttaacgatcaagcgcggatcaaacggttttggaatgatgtattccggaccaaagctcagatcctgatcgccatacgctgaagccaccacttcactctgttccgcatgggccagttctgcaatcgcgcgtactgccgccagtttcatctcttcgttgatggcggttgcgccaacgtccagcgcgccacggaagataaacgggaagcaaaggacgttgttcacctggttcgggtagtcggaacggccggtacagatgatggcatccggacgcacttctttcgccagcggcggcagaatttccggttccgggttcgccagcgccaggatcattggcgcacgggccattttcttcaccatttcctgggtcagcactttcgggccggaacagccgaggaaaatatccgcgccttcaatcacatcatcgagggtacgtttaccgtcatccaccaccgcgtatgcggctttggtttccgccatgtttggctcacggccctgatagataacgccttttgaatcgcaaaccacgatgttatgtttttgcagacccagcgctaccagcaggttcatacaggcgattgctgcggcacccgcgccagaaaccaccatccgcacgtcggagatgtttttctccaccacgcgcaagccgttgaggatggcggcagtgctgataattgccgtgccgtgctgatcgtcgtggaataccggaatattcatccgctcgcgcagtttctgttcaatatagaaacattctggcgctttaatgtcttcgaggttgatgccgccgaaggtcggttcgagcgcagcgacgacttcaataaatttgtccgggtcgagttcatcaacttcaatgtcaaatacatcaatcccggcgaatttcttaaacagaacgcccttgccttccatcaccggtttgcctgccagcgcgccaatgttgcctaaccccagcaccgccgtaccgttagagatcaccgctaccaggttaccgcgcgcggtatatttgtaggcttttaacgggtctttttcgatttcaagacaaggtgcggcaacgcctggtgagtaggccagcgccagatcgcgctgcgttgccagaggcttggttggagaaacctggattttccctggaactggaaattcatggaaatcaagtgcactttgttttaactggtcatccatttggttgttcctttcacgtaacgttcacaaataaagtgtgtgggcaacagcccctgtccacaacgtggcgcacattattaccctgccggagtctacagactttgagcaagtccaaactctcaccattaatataatgttttggtaataatcatataacactgatgttacctgcttaatccagcaataccatgcctgtctgctatgcttttttgatgcgtttagcgaaatttctcagaagtgtgaattaacgcactcatctaacactttacttttcaaggagtatttcctatgaacgagttagacggcatcaaacagttcaccactgtcgtggcagacagcggcgatattgagtccattcgccattatcatccccaggatgccaccaccaatccttcgctgttactcaaggctgccggattatcacaatatgagcatttaatagacgatgctatcgcctggggtaaaaaaaatggcaagacccaggaacaacaggtggtcgcagcgtgtgacaaactggcggtcaatttcggtgctgaaattctcaaaatcgtacccggtcgcgtgtcaacagaagttgatgcacgcctctcttttgataaagaaaagagtattgagaaggcgcgccatctggtggacttgtatcagcaacaaggcgttgagaaatcgcgcattctgatcaagctggcttcgacctgggaaggaattcgcgcggcagaagagctggaaaaagaaggtatcaactgcaacctgacgctgctgttttcttttgcacaggcgcgggcctgtgcagaagcaggcgtttttctgatttcgccgtttgtcgggcgtatttatgactggtatcaggcacgcaagccgatggacccgtatgtggtggaagaagatccaggcgttaaatcagtacgcaatatctacgactactataagcaacaccactatgaaaccattgtgatgggcgcgagcttccgtcgcaccgaacaaatcctcgccttaaccggctgcgaccgactgactatcgcaccgaatttgctgaaggagctacaggaaaaagtttcgccagtggtacgtaaattaatcccaccttctcagacgttcccacgcccagctcccatgagcgaagcggagttccgttgggagcacaatcaggatgcgatggcggtagaaaaactgtctgaaggcattcgtctgttcgccgttgatcaacgcaaactggaagatcttcttgccgccaaactataaaccagccacggagtgttatatgtcccgaaaagaccttgccaatgcgattcgtgcactcagtatggatgcggtacaaaaagccaattctggtcatcccggcgcgccgatgggcatggctgatattgccgaagtgctgtggaacgattttcttaaacataaccccaccgacccaacctggtatgaccgtgaccgctttattctttccaacggtcacgcgtcgatgctgctctacagtttgctgcatctgaccggttacgacctgccactggaagaactgaagaacttccgtcagttgcattcgaaaacccctggtcacccggaaatcggctatacgccaggtgttgaaaccaccaccggtcctcttggacaaggtttggcgaacgccgtcgggctggcgatagcagagcgtacgctggcggcgcaatttaatcagccggatcatgaaattgtcgatcacttcacctatgtgtttatgggcgacggctgcctgatggaaggtatctctcacgaagtctgttcgctggcgggcacgctggggctgggcaagctgattggtttttacgatcacaacggtatttccatcgacggtgaaaccgaaggctggtttaccgacgatacggcaaaacgttttgaagcctatcactggcatgtgatccatgaaatcgacggccacgatccgcaggcggtgaaggaagcgatccttgaagcgcaaagcgtgaaagataagccgtcgctgattatctgccgtacggtgattggctttggttcgccgaataaagcaggtaaggaagaggcgcacggcgcaccgctgggggaagaagaagtagctctggcacggcaaaaactgggctggcaccatccgccatttgagatccctaaagagatttatcacgcctgggatgcccgtgaaaaaggcgaaaaagcgcagcagagctggaatgagaagtttgccgcctataaaaaggctcatccgcaactggcagaagagtttacccgtcggatgagcggcggtttgccgaaggactgggagaaaacgactcagaaatatatcaatgagttgcaggcgaatccggcgaaaatcgctacccgtaaggcttcgcaaaatacgcttaacgcttacgggccgatgctgcctgagttgctcggcggttcggcggatctggctcccagcaacctgaccatctggaaaggttctgtttcgctgaaggaagatccggcgggcaactacattcactacggggtgcgtgaatttggtatgaccgctatcgccaacggcatcgcgcaccacggcggctttgtgccgtataccgcgacgttcctgatgtttgttgaatacgcccgtaacgccgcgcggatggcggcactgatgaaagcgcggcagattatggtttatacccacgactcaattggtctgggcgaagatggtccgacgcaccaggctgttgagcaactggctagtctgcgcttaacgccaaatttcagcacctggcgaccgtgcgatcaggtggaagcggcggttggctggaagctggcggttgagcgccacaacggaccgacagcactgatcctctcaaggcagaatctggcacaggtagaacgaacaccggatcaggttaaagagattgctcgtggcggttatgtgctgaaagacagcggcggtaagccagatattattctgattgccaccggttcagagatggaaatcaccctgcaagcggcagagaaattagcgggagaaggtcgcaatgttcgcgtagtttccctgccctcgaccgatattttcgatgcccaggatgagaaatatcgggagtcggtactgccttcaaatgtttctgcccgcgtggcagtagaagcgggtattgccgattactggtacaaatatgttggcctgaaaggggcaattgtcgggatgacaggttatggggaatcagctccggcggataagctgttcccgttctttggctttaccgccgagaatattgtggcaaaagcgcataaggtactgggagtgaaaggtgcctgatggtgatcgcctgatgctgtatgttcccctcaccctaaccctctccccagaggggcgaggggacggtccgtgcgctttttaggggcgcatctgggattttgtttaacgggtgatccacaacgtgggccaggcgtctggcccatgccagttatcgcaggtgggttctgcggcgtaacgcaccaggcgaaaacgctgaccgtcaaagcgccagcgcgcctgaatgccacaatcgcttaatccgcgcccttttgctaaggtcaccagttcacgcgatttttcatcgaatgttgcgttcatcagttccagttcattggtctcctgaccgttgttgaacggcaaacgcaaccgtaccgggcgcgaggccagcggctttttacgcgacacaatccatgccaaatcaatggtgttataggccccagcctcacagctaatcatcatcagcgctttatcatcggtcagcgcagtgacattcacctcacgacgtaacggatcaagcgaacagcgcagaccattcatccgccagtttccataatccagcaaatcgttacgttcttcgcgtgagagtggcgtcggcgttgggttaaccaccacgacctctttcagcgcaggcgctggcggtacgctgagcggcggttcgtcccctttctttatccacgcggtctcactgccaacgcgcttttgctgggcatcaataaacaacaacgccgcttttaagccactcagagaaatagtctgattgccgtcgcgtaaggtgatcgccctcccttcctgaatcatctgcaaaaacgcggtgatggttgccgtatcatcggttactaataaccatggtgaaatccgccacttgtcaccacttaacgccaacggctcaccatctaacagcagccgtggcgctatctccccttctgacgcatccggcgacttcaacccgccgcgctcaatacgtaaaacggcatcggtatgcgccccggcgctgcggctcagggtcatcaccagtccattatgatcgcccgtattgcgcgctacacagaaattttgattattacaggtgacctgccagtcggaaaacgcccgttgcgctggtgccgcccacaccaaagacatcggcaacaaaacgaaaaaaaagagaaggaaaatgcgatatcgcatggacggtacgaccccagaagttcaaacaaacagcacaagtcgtatcttcgttgcgcaggtagcgcggctcaatcggatttgtcggattgagccaataataaacaacgaaatattattgttatttttcagtccattaaatgtgacatttgcaaatagttaagcaataacaccgtcttaccgtcacgtatctcgccggttttaatcatctccagcgcctggctgaacggcagctcaagcacttcaatatcttcatcttcgacaccaccaccggcgttagcgcgctggctgtcactgtattcggcgataaaaaagtggattagctcagtcacaccgcctggcgacatatacagttcaaataatttgcggacttcgccaacttcatagcccgtctcttcaatcgcttccttgcgaatgcacacttccggttcgtcgttatccagcagcccggcgcaggtttcaatcagttgcccgctttcattgccattaacccaggtagcgacgcggaactggcgaatcagaaccacggtctttttcttcgcgttgtacaggaggatcgtcgcaccattaccgcgatcgtaaacttcacgtttatggcggataacttcgccatctttgcgcgtgagatcgtaagtaatgttgtgcagggtgaaatagttatcggagagaattttgtctttaacgagggtgatttgttgcgtcataccgactccacagcgcgaaatgaacaattatcttacgctgtgaagtcgggtttgtctgcgcaggctatcagtgagatttgactgattttacgcccagccagtcaatgatcccctgtgccgcatgacgtccttctgccattgcggtaaccaccagatccgcaccacgcacggcgtcaccaccggcgaagattttcggattcgtggtctggtaacggtactggctttccacatccgcgatgatgcggccccatttgtctaccgttacaccgtgcgactccagccacggcatcccgtgcggattgaagccaaacgccataatcaccgcatcggctggcatgacaaattcactgccttccaccggcactggacgccgacgtccctgggcgtccggctcgccaagacgcgtgcgcaggaaacgaatcctgcagacgtgaccttgttcattcagttcaagcgccaccggctggacgttaaattcgaagttggccccctcttcacgggcgttcttcacctctttcttcgagcctggcatgttagcttcatcacgacgataagcgcaggtgacgttactcgcgccgtggcgcagcgcagtacgcacacagtccatcgcggtgtcgccgccgcccagtaccacgacgttaagtccggcagtattgataaacggctcttccggtagctcttcgagtcccatcacctgtttagtattggcgatgaggaacggcagcgcgtcataaacgcccggcgcatcttcattgggtaaacccgctttcatggaacggtaagtgcctacgccaacgaagaccgcgtcgtattgttccaaaagcgaattcaaagagacatctttacccacttcacaattgagttcgaagtgaatccccatcgcgctgaagatttcccgacggcgtgccagcagggatttatccagtttgaaagaaggaatgccgaaagtgagcaagccaccgatttctggatggcgatcgtacaccgtcaccgccacgccattgcgggtgagaacatctgcacaggccagccctgccggacccgcaccgataatcgccacccgcttgtccactttggtgacatggcttaagtcaggacgccaacctttcgccaacgcctgatctgaaatgtagcgttcaatgttaccgatagttactgcgccgtgctcatcgcgaatagtacaggcaccttcacacaaacggtcttgcgggcaaacgcgtccggtaatttccggcagggtgttggtctggtgagaaagctcgacggcggcgtcgatgtttccggctttcaccagttcaatccactgcggtatatggttatgcagcgggcaggtccattcacaaacgctgtgctcgccgcacttaaggcagcgcgaggcttcccgttgtgcctgatcggcacggaatggcagataaatttcatcaaaaccggttttgcgcgcttcaatcgccagtttatctggctcgccacgcgcgggcgttgcctgcatttgctcgactttactcattaccggcatttcttgcgccgcggtactggcatgccacggttgatgttcctgacgtgcggtgcgcaagcggcgggatttcgccatgccggagagtgcggcgtcagtgaccagttgcagcgcgtccgccgggcaattttcgacacaggcaggaccgttttcgcgccctgcacaaaggtcgcatttatgcgccgtggcttttacttttcctaccgcaacgggtgtcagaacgatttgcatcgtaccaaatggacaggccaccacgcaggatttacagccaatacacttttgctgattgacctgaatgctgtcatcaacgtggctgattgcgccattagggcagctacgggcgcagggcgcatcttcacaatggtgacaggtcactgcactacgttgctgctgatgtttgataaccgtaattcggggatgaaaatggtgttggctcaggacatgttgctcgtcattgtgagccatgacacaggcgatttcacaagcatgacaacccagacattgctgactgttggccataataaaacgattcataacgaccttcttttttggttgtaaaaaccttattctttatatgagtgttgttattacccgacttacaggggaatcggcaatgttcatgtgcccagaataagtaactatttcgctataaactgtggcagatcaaataatcccatcactgactaaatttcgtttcagcgaactggaacattaatgattttttgtggagaagacgcgtgtgattgttaaacgacccgtctcggccagtctggcccgggcctttttttacattgtgctgctgtcgattctttccacgggtatcgctctgctaacgctggcgagcagtttacgcgacgctgaggctatcaatattgccggatcgctgcgtatgcagagttaccgcctgggctacgacttgcaaagtggcagtccacaactcaatgcacatcgtcagttatttcagcaggcactgcattcaccggtattaaccaatctcaacgtctggtatgtgccagaggcagtaaaaacccgctatgcgcatctgaatgccaactggctggagatgaataatcggctcagcaagggcgacttgccgtggtatcaggccaatattaataattatgttaatcagatagacctgttcgtgctggctttacagcactacgctgaacgcaaaatgctgctggtggtggcaatttccctggctggcggcatcggtattttcacgctggtcttttttactttgcgccgcatacgccatcaggtggttgccccgctgaatcagctggttaccgccagtcagcgtattgaacacgggcagttcgactcgccgccgctggataccagcctgccgaatgagcttggcctgcttgcaaaaacctttaaccagatgtcgagcgagctgcataaattgtaccgttcgctggaggcgtcagtagaagaaaagacccgcgatctccacgaggccaagcgtcgtctggaggtgttgtatcagtgttcgcaggcgctaaacaccagccagattgatgtgcattgtttccgccatattttgcagattgttcgcgacaatgaagcggctgaatatctggagttaaatgtcggtgacaactggcggattagcgaagggcagccaaacccggaattgccgatgcagattttaccggtgacaatgcaagagacggtttacggcgaactgcactggcaaaatagtcacgtttcatcatcagaaccgctgcttaacagcgtttcgtcgatgctgggacgcggtttgtactttaatcaggcgcagaagcattttcagcagttattgttgatggaagaacgtgcgaccatcgcccgcgaattgcacgactcgctggctcaggtactttcttacttacgtatccagttgacgttactgaagcgttcgataccggaagataacgccaccgcacaaagtatcatggccgatttttcccaggcgttgaatgatgcttatcggcagttacgcgagctgttgactactttccgcctgacgctgcagcaggcggatctcccctccgcgttgagggaaatgctggatacgttacaaaatcaaaccagcgccaaactgaccctcgactgccgtctgccaaccctggcgctggatgcgcaaatgcaggtgcatttgttgcaaattattcgcgaagcggtgctgaatgcgatgaagcacgccaacgccagcgaaatcgccgttagctgcgtcaccgcgccggatggcaatcacacagtctatattcgcgacaacgggattggcatcggtgaaccgaaagaacccgaaggccattatggtctgaatatcatgcgcgaacgcgcggaaagattgggtgggacgctgactttttcacaaccttccggcggcggcacgttagtgagtattagctttcgctctgcggagggtgaggaaagtcagctgatgtaatgcctcttattgaccaaagaatagtggcacttaaggttcagtataaaagggcatgataatttacattaactcctttttttctccacgattggctcgtaccttgccgctacagtgaagcaagccaagcctacaacgatacgcagaaacacgaggtcctcttttaatggcgaatttctttattgatcgccccatttttgcctgggtgctggcaatcctgttgtgtctgacaggtaccctggcgattttttcattgcccgttgaacaataccccgatctcgcgccaccgaatgtgcgagtgaccgctaactatcccggcgcatcggcccagacgctggaaaacaccgtgacccaggttatcgagcaaaatatgacgggcctcgataatctgatgtatatgtcatctcagagcagcggcaccggtcaggcatctgtcacgttaagttttaaagcaggcaccgatccggacgaagccgtgcagcaagtacaaaaccagctacaatcagccatgcgaaagttaccgcaggcggtgcaaaatcagggcgtgacggtgcgtaaaaccggcgatacaaacattctgaccattgccttcgtctctaccgatggttcgatggataaacaggatattgccgattatgttgccagtaatattcaggacccgttaagccgcgtgaatggcgtcggggatatcgatgcctatggttcgcaatattccatgcgtatctggctggacccggcgaaactcaacagtttccagatgacggctaaagatgtcaccgatgccattgaatcacagaacgcgcagattgcggttgggcaacttggtggtacgccttccgtcgataagcaggcgctcaacgccaccattaacgcccagtcactgctgcaaacaccagaacagttccgcgatatcaccttgcgggtgaatcaggacggctcagaggtaaggctgggcgatgtcgccaccgtcgaaatgggggcggagaaatacgattatcttagccgcttcaatggtaagccagcctccgggctgggggtaaaactggcctccggcgcgaacgaaatggcgacagcggagctggtgctcaatcgtctcgacgagctggcgcagtattttccacacggactggaatacaaggtggcgtatgaaaccacctcttttgtaaaagcctccattgaagacgtggtgaaaacgctgctggaagctatcgccctggttttcctcgttatgtatctgttcctgcaaaacttccgcgccacgctgatacccactatcgccgtgccggtggtgttgatgggaaccttctcggtgctttatgccttcggctatagcgtcaacaccttaaccatgttcgcgatggtgctggctatcggcctgttggtagatgacgccatcgtggtggtggaaaacgtcgaacgtattatgagtgaggaaggactcactcctcgcgaagccacacgtaaatcgatggggcaaatccagggcgcactggtcgggattgcgatggtgctttcggcggtatttgtgccaatgaccttcttcggcggcaccaccggggccatctatcgccagttctctattaccattgttgcggcgatggtgctgtcagtactggtagcgatgatcctcactccggctctgtgtgccacgctacttaagccactgaaaaaaggtgagcatcacgggcaaaaaggcttttttgcctggtttaaccagatgtttaaccgcaactccgaacgctacgaaaaaggggtggcgaaaattctccaccgtagcctgcgctggattgtgatttatgtcctgctgcttggcggcatggtgttcctgttcctgcgtttgccgacgtcgttcttaccgctggaagaccgtggcatgtttactacctcggtacagttgcccagcggttcaacccagcaacagaccctgaaagtcgttgagcaaatcgagaaatattacttcacccatgaaaaagacaacatcatgtcggtgtttgccaccgtgggttctggccctgggggtaacgggcaaaacgtggcgcgaatgtttatccgcctgaaagactggagcgaacgcgacagtaagaccggcacctcgtttgccattatcgagcgtgcaacgaaggcgtttaacaagattaaagaagctcgcgttatcgccagcagcccgccagcaattagcggtcttggtagttctgcgggttttgatatggagttgcaggaccacgctggggcaggtcacgatgcgctgatggcagcacgaaaccagttgctggcgctggcggcggaaaatccggagttaacccgtgtacgccataacggcctcgacgacagtccgcagttgcagattgatatcgatcagcgtaaagctcaggcgctgggcgttgctatcgacgatattaacgacacgctgcaaaccgcgtggggttcgagctatgtgaatgactttatggatcgcggtcgcgtgaagaaagtctatgtgcaggcagctgcgccgtatcgcatgctgccagatgacatcaatctctggtatgtccgaaataaagatggcggcatggtgcccttctctgctttcgcgacctcacgctgggagacaggctcgccgcgtctggaacgctataacggttattctgcggttgagattgttggggaagccgcaccgggggtcagtaccggtacggcgatggatattatggaatcgttagtgaagcagctgccaaacggctttggtctggagtggacggcgatgtcgtatcaggagcggctttccggcgcgcaggctccggcgctgtacgccatttccttgctggtggtattcctgtgtctggcggcattgtatgaaagctggtcggtgccgttctcggtaatgctggtcgtgccgctgggggttatcggcgcgctgctggcaacctggatgcgcgggctggaaaacgatgtttacttccaggtgggtctgttaacggtcattggtttatcggcgaaaaacgctatcctgatcgtcgagtttgctaacgagatgaaccaaaaaggccacgacctgtttgaagcgacgctccacgcctgccgtcagcgtttacgcccgattctgatgacctcgctggcatttatcttcggcgtattgccaatggcaaccagcacaggtgccggttccggtggtcagcatgcggtgggtactggcgtaatgggcgggatgatttcggccactattctggctatttacttcgtgccgctgttctttgtgctggtgcgccgccgcttcccgctgaagccgcgcccggaataagcaataaaaaaggcgacatgccaatgtgtcgcccttttcaactttccgattaagaacctgctcagcaggttcttgctgtttgtactttgtctcaggaattacttacgaagcataacttcgataaagtctttccagttccccagttcacgttcaatcataacaacctctcttataattatgggtattctacggaaacaatataccgtggtgaagctaatttactcgattgctgcgatgactacctccgggggacaaaccttatgtaaatactatggtcctgcggtgatgatttgtatgtgatacaccgcaacatttcgagatattcatacggcatctaatactgatttaattctggttaaaatacagacagataacaagatgaatattcttaatgtttacgttaaaaatgtttaatgttatttaatagttgttaatttgaatacttcgataatgttatatttcctgataatcatttgcaggcaaaatgttttcacctttaaatgagtatttattctcataaatcgaaaaaggattcattatggttacactttacggcatcaaaaattgtgacaccattaaaaaggctcgccgttggctggaagccaataacatcgactatcgttttcatgattaccgagtcgatggattggacaacgaattattgaacggttttatcaacgaattaggctgggaagcgttactcaacacccgtggtacaacctggcgtaaactggacgaaatcacccgcaataaaatcaccgatgcggcctctgcggcgacattaatgactgaaatgcctgcaattatcaaacgtccattgctctgcgcgcctggtaagcctatgctgctgggtttcagtgaatccagttatcagcaatttttccatgaggtgtagtctatgtcgtgcccggttattgagctgacacaacagcttattcgccgcccttccctgagtcctgatgacgcaggatgccaggctttgttgattgaacgtttgcaggcgatcggttttaccgttgaacgcatggactttgccgacacgcagaatttttgggcatggcgtgggcagggtgaaacgttagcctttgccgggcataccgacgtggtgccgcctggcgacgccgaccgttggatcaatccgccgtttgaaccaaccattcgtgacggcatgttattcgggcgcggtgcggcagatatgaaaggctcgctggcggcgatggtggtagctgcagaacgttttgtcgcacaacatcccaaccatacggggcgactggcatttctgatcacctctgatgaagaagccagtgcacacaatggtacggtaaaagtcgtcgaagcgttaatggcacgtaatgagcgtctcgattactgcctggttggcgaaccgtcgagtatcgaagtggtaggtgatgtggtgaaaaatggtcgtcgcggatcgttaacctgcaaccttaccattcatggcgttcaggggcatgttgcctacccacatctggctgacaatccggtacatcgcgcagcacctttcattaatgaattagtggctattgagtgggatcagggtaatgaattcttcccggcgaccagtatgcagattgccaatattcaggcgggaacgggcagtaacaacgttattccaggtgaactgtttgtgcagtttaacttccgctttagcaccgaactgacggatgagatgatcaaagcgcaggtgcttgccctgcttgaaaaacatcaactgcgctatacggtggattggtggctttccgggcagccatttttgaccgcgcgcggtaaactggtggatgcggtcgttaacgcggttgagcactataatgaaattaaaccgcagctactgaccacaggcggaacgtccgacgggcgctttattgcccgcatgggggcgcaggtggtggaactcgggccggtcaatgccacgattcataaaattaatgaatgtgtgaacgctgccgacctgcagctacttgcccgtatgtatcaacgtatcatggaacagctcgtcgcctgatgagtggttctgcaagaggaaataagcatggactggctggctaaatattggtggattctggtgattgtctttttggtaggcgtcctgctgaacgtgattaaagatctcaagcgcgtcgaccataagaaatttctcgccaacaagccggagcttcccccgcatcgtgatttcaacgataagtgggacgatgacgacgactggccgaaaaaggatcaaccgaagaagtaagctaagtggccggataaggcgttaacgccgcatccggccatgatgcctgatacagtcttatcaggcctacccggctattattacatcatttcaatcacatcatcatcgccaggcttaccgccacttagcgcttcgtcgaaataatgtttcggaatggtataacgcaagtgatccagggctaattgcatactgcgattgtcgatcgcatggcctaaatcctccacgatatccagcgtcacatcgccaccggcactgattaacgcttcctgcgccgcaaccgcatgcgccagatcgataaccggatcttcaccgccatgaatcaagtgaattgttgtggctgtagacgcagtttccggcaggctcgcatagcgtccgttaaaggcaatgacgcgtgaggcaaggcccggttcggctttaatgctctccagcgccataatcgcgccttgagagaaaccgattagcgccgtggcgttagcccctactccgctctgtttctgccagtagcgcaccgtttcaataaacgtcggcatgatggcatccacacgcgcctggcgattatcttccgtaataccctgcaccgaaaaccactgacgccccgccggattaccgctcggctccgcgccaccgacactcaccaccagcgcatcaggaaacagcggcgcaaaccagctacctatttcccccattgccaccgggttatccccgacaccgtggaaaagcagtaacaactgttgtgctggtttatccgggctttgaacaacaaaatggtcatgtttcatggcgaactccttaactgatgtcattaattttacgccgctgactcacaatgaccatgggagaaaattgaaggagtcagtgaaaaaattgccattgcgttatgcgatcgcgcagacgctcagtgcgaacatcatcaagtgcgaatagcgcctgcgcggcctcttcccgctggcgaaccagtaacagcttacggcctgaaagtttaagtgtggtacataactgcgcgtcactggcgtttttctgtaaacgcccacgcagcgccggtaatgccagttcgctggtttgtagcaaacgcaataagcaacctaacgatgttaatagcggacgatgagtgaaagcaaaaccggccagttcaagccagtcgtcgtcagaaaggacggcatcgtttagtggatcaacaggaagcatttcgccattccactgcgcgagagcttgcgcatcgcgacgtaaacggtaatgctcacgttcagccagttgtttacccgcatcactcatcggtaacagcgccatcgccgtatagcaaccgctgctggcttcacgatgattacccattcgcaccagcacaaaaccgcagcgttgccagaaacgccataactcctcggtgtaaccaaaactcaccgaaagatagtcgaggtcatgaatatattgcaaagcaccagcaataagctgtcgccctgtgccttcccgctgacgagccggatgaactgctatccggctaacccgccgtccgcgcaatgtcgccgccagtggattgctgccgtgcgccgccagcgattgagccaccagattgccccgtggacgacgataacccgcccataccgcctgactgagttcttgagataatccaccctcatccaccagacacagcgctccggcaatctcgttttcgccagccgcctgtaaaaaatgttgacctggtgcatccatcatgcggcgtaaatccagcggcgaagtccggtagtgcgcaccagacaataattgataaacctttaacggcgtttctggctcgcttcgccataacgtctgttcaaatgcggaaataacgatattgccttgtggtgtatgggtgaagttttcatcgtcaaacaccagtgcctcactaaccattttttccagcgggcatccctgcgcccaacggatcggctgttgtagttcaaaacggtgtaaatgcggaaagcgagcgcaaaatttcagcaaaaaaccacgtccggtgccttcgtagccctgcaccgtagtggttaacaacgttcgaggaaaacgcgataccagttgatgcaacaacggcgcaggtatagctgcggcttcatcgaccaccagccaatcggcttgctcatcgctggctaacaaggcatccggtgcaataaagcgaaacttctcgcccgcaaattgtgccagtacatccgttgccgcttttgcgggcgcggtgacaatcgcactgcccgcaatacgagaaatgagttgccctgccaacgccgacttaccgcgcccacgcgcagcagttaccgctgccacgcccggcggcatggtcagtaactgctgtaagagttgctgttgttctggttgtggtgcgccggtagcggggtgccagtcagtacggggagtaaaatgcgccaacgagaacggctggttttgccgccagaggatagcgtcgttattcgccgtaagtacacgtttgaggtgcaggacaaaatgcggcgtcgcaatagggtcagggcaatcactccagcgcagcgagtcggcatcaggttggttttcccactcatcccatacagggagtaacaacaccagccagcttcccgctttcaacgttccgctaagtgccgcaaaggcagcggcatcaaagccgtagcgggcgtcgaataccgcatgccggaactcgcgcccaagtaaagtttgtagtgccgagggagaacagtggttttcagcatctggctgcggcgaaatccacagccagtcgccaggtaaggcatcacgcaacttaagcgcatgatcaaaacaccaacgctcttccccgctcaacaccagcaagcggcggatcccttcaagtttcatttgcgctgttaatgtgtgaagcgcagtcagttcagccatccctgccccggaagttaaatgcttttaccaaaagtattgcattgtgccggatcgccgctgtcgaaaccacgtttaaaccagctgtagcgttgctgagaagtgccatgagtgaaactgtctggtactactcgcccctgactttgctgttgtaaacggtcatcgccgatggcctgcgccgcgttcagcgcctcttccagatcgccggtttccagaacaccttgctgctgcatactatgcccccagacaccggcaaaacagtcggcctggagttccatacgcacagataagcggtttacttccgcctgcgtcgcgttttgttgcagttgacgaactttcggctcgatgcctaacagtttctgcacatgatgaccgacttcatgagcgataacgtacccctgggcaaaatcgccatccgcgccaagtttgtctttcatgtcatcatagaaggagagatcgatataaactgtgccatccgccgggcaatagaatggccccattatggactggcccgccccgcagccggtacgcgtcattccacggtacatgaccagcttcggttgctgataggttttacccatcttctcgaattgctgtccccaggtgtcttccgtggttgccagaatcaccgaggtgaattttgcggcttcgtcttcattagggctaattgaccgcgttgattgctgttgggaaaccggctgtccggtcatcaacccggttaaatcaacgccatagtagcctgcaaccagcacgactatcagtaaaatcagcccgcctttaccgcttggcaggcgaaaaccgggaccgcccattgacggaccgccggagctattgcgcctgtcttcaacattgtcactttcacgtcgcccttgccaacgcatagatacctcaacattatattcattatagaaatgatcgtaggtggatcagaggaagattaccacaggaaagcgggatgaaatggcggaggaatgagcgttcaatactcatcttatgagagcggttgtcttgccgtgccagcagcacggcaagatgatgaatagaaaaatcagtccagctgtacacccaggcggcgggcaacggcttcataggcttcgatcaggccaccgaggctctggcggaaacggtctttgtccattttctccagcgtttctttgtcccacaggcggctgccgtccggggagaactcatcgcccagtaccacttcacctttgtacagaccaaactccagcttgaagtcgaccagaatcagaccagcatcatcgaacagttttttcagcacgtcgttcgctttgtaggtcagctctttcatacgcgccaggttctctttgctcacccagccaaaggtttcgcagtaagattcgttgaccatcggatcgtgcatggcgtcgtttttcaggaacagatcgaacagtggcgggttcagctcaataccttcttcgattccaagacgtttcaccagagagccagcagcacggttacgcacgacacactcaaccggcaccatatccagctttttcaccagacattcggtatcggagagcagacgctccatttgagtcgggatacccgcttcagccagtttgctcataatgaagtagttgaacttgttgttcaccatacctttgcgatcaaactgctcaatgcgcgcgccatcccctgctgacgtatcattgcggaattcgagcaccaacaggtccgggttttccgtgctgtatacggttttcgctttaccacgatacaactcagcttgcttttgcatctttatcactcctgggtgtgaattaacgttttaaaatcttttgctgtctggtgtgccggatgttttatcggatgcggcgtgaacgccttatccgacctacgtccgacaaacaaatttcgtgcgaattaccgctaaaatcgcgtttttctgtcgacgcacacgtttgcgtatcatatcagaaaaaagggccggatgactccagccctgtatttttacttgctaaacgcagcctggaagacagctaccagcgcgtcgttctgactctgagtcagagtatgacctttcggatcgatgaactgtaggctgctgcggttatctaaatcgccaacctgcagtttatagtcaccggatgccagacctggatcgctcgcgcccagttcgtgccattcgctgtcagacagcggcttataagttacggccatgttgccctgcgaacgggtgctgtcggtcactttcatgcccactttttccagcgcagctggcagacgttgccaaaccacattgaacggcccgcgtacgaccagcattggtaaaccggtgtcatcagctgcactttgtacgtccatagtggtggaggcacggttttgcgcagcgttcgcggcgtcagtggcagatttatccagaccggcggaaataacgttcatcatctccgtgctgtaacgctgcatggaagccgcgtctgcaaccggtttgcccgcctgttccaggttcagcagtttaaccgtaaccgcctgctgataaccctgcggcttaacagagatttgataacgaccacgatactgctcgtcttcgtccagacggttccattgtacccaatcggtggtcagtgtctgaccagcatcatcacgttgggtgatggtgtagtttttcgcctgcagcacgctaaccacctgcggccacagagtattgccacgaccattttccaccagcaatgaagcggtatcgcccgtgaactgggtacgcgcgccagaaaccagtgccagcggctgggctggtggacgaatgtccagcgccttaccgacggcaccactaccgttggtcaccgggattgcataatcgccggaggtcaccggcaagatcattccagccggggcatgaagctccgcaagcggtgccgcttccaggtaggcttcatcaccactgacctgacgcttatagcgtgagtcagaactacaggcagcgagtaataaaacaagcgaaacacccgcaacctttgccaggcgcgacttttgaacagagtaagccatcaaatctccctaaactttacagcaaaccggcatgcttaagcgccgctctgaccgtctcacgaccactgtcggtgattggtgtcattggcaggcgcagcgtatcggtcgccacaagacccagttccttacatgcccatttcaccgggattggattgggttcgacaaatagtttgttgtgtaatggcatcagacgctgattaataacgcgtgcctcggcaaaatgcccttctgctgccagtttgcacatctgggccatatcacgcgctgcgacgttagccgtaacggaaataaccccatgaccgcctaattgcatgaagtccagcgcgctcgcatcatcgccgctcagcagaacaaaatcatctgaaaccagctctttgatctggtttacacgcgttaagttccctgttgcctctttgattccgataatattttttactttcgccagacggcccaccgtttccgggagcagatcgcagccagtacgggacggcacattatacagaatttgcggcaggtcagtatgttcagcgatggctttgaaatgctgatacaaaccttcttgcgacggacgattgtagtaaggggttaccgtcaggcagccgacgataccgctgtcattgaagcgctgcgtcaggctaatggcttccgcagtagcgttagcaccggtcccggcaatcaccggaatgcgcccgtcagccagctccagcgtcatcatcaccacatcagcatgttcgtcatgatttaaggtagcggactcgccagtggtgccaacagaaacgatcgccgaagtaccgctggcgacatgataatcaatcagttttttcaagctagcccgacagacattacctttttcatccatcggagtaacaatcgcgacaatacttcccgtgaacatgggccatcctctgtgcaaacaagtgtctcaatggtacgtttggtatggcattaaaagcaagcagacagaaccgttctgattgttgtatgcatgttttttttatgctttccttaagaacaactcaccccttgaaggaataaccagtttgacactgtcatcgcaacattatctggtgatcactgcgttgggtgccgatcgccctggaatagtgaacaccatcacccgtcatgtcagtagttgcggctgtaatattgaagacagtcgcctggcgatgctgggagaagagttcacgtttatcatgctgctttccggttcatggaatgccattactctgattgaatcaacgttaccgttgaaaggtgccgagctggatcttttaatcgtgatgaagcgcacgacggcgcgtccgcgtccgccaatgccagcatctgtctgggttcaggtcgatgtggcagactccccgcatttaattgaacgcttcacagcacttttcgacacgcatcatatgaacattgcggagctggtgtcgcgcacgcaacctgctgaaaatgaaagggctgcgcagttgcatattcagataactgcccacagccccgcatctgcggacgcagcaaatattgagcaagcgttcaaagccctatgtacagaactcaatgcacaaggcagtattaacgtcgtcaattattcccaacatgatgaacaggatggagttaagtaatgaatccactgaaagccggtgatatcgcaccgaaatttagcttgccggatcaagacggagaacaagttaatttgaccgacttccagggacagcgtgttctggtttatttctacccgaaagccatgacccccggctgtaccgtacaggcctgcggcttacgcgataacatggatgagttgaaaaaagcgggcgttgatgtgctgggtatcagcaccgataaacccgaaaaactctcccgttttgcggaaaaagagctgcttaactttacgctcctgtctgatgaggaccaccaggtgtgcgaacaattcggcgtctggggtgaaaagtccttcatgggcaaaacctacgatggtattcatcgcatcagcttcctgattgacgctgatggcaaaatcgaacatgtttttgacgatttcaaaaccagcaatcaccacgacgttgtgctgaactggctgaaagaacacgcctgattactttgctccattccgtgctggctgcgcttgcggccagcacatctcaaatcttctcactgccctgcaacactcgtttcaaattttttcgctgaaggtcagtcttgcgcgatttgcccatcaggccaggcgtgaatcacggctttgatcagcgtcgccaatggaatagcgaagaatacgccccagaatccccacaaaccaccgaagatcaccaccgataaaataatcaccagaggatgcaggttaaccgcttcggaaaacaacaccggtactaacaggttgccgtccagcgcctgaataatcagatacaccgcgaagcagctccagaattccgtgccagcaccaaactggaatagcgccacgccaaccaccggaatggtcaccacaaatgcgccaatgtacggaataagtaccgagaagccgaccagcaccgccagcagcagcgaataattcagcccaaagagcaagaaccccagccaggtggcgatccctaccacgatcatctccagcactttgccgcggatatagttggtgatttgttgattcatctccttccacacctgtcctgccagtccacggttgcgcggcagcacccggcgaacggcgttcagcatctgctctttgtctttcagcaggaagaagaccatcaatggtaccagcaccagatagacggcaatggtcagcaaaccgaccaacgaggcgagggaaattttcaccaccgagtcccccatactgagcatccggctacgcatattttcagccattgcatcaataatccccgcatccattaatgccggatagcggcgcggtaacgtggcagcaaaatcagaaagtttattaagcatccctggcatatcgcggattaagtagatgccctgctgccaggcgataggcagtaccacgaacgccatcagtagcaggatgcccacaaacaggatcagcacgatagatgtcgcccaagggcgggaacagccaatagactgcaggcggacagtcggccattccagcaaataggccagaacaatagccaccagcaacggcgcgagtaggccgctaaagaaaaagataatgccaaaaccagcaaccaaaataaccagcaaggcaatcgcttccgggtcgctaaaacggcggcgataccattgcatcaacatttcgagcatacagaccttccctgaacctcaagagcgggattgcgatccgcaattgtatcgaaatgtcacaaaaaagacttcgctttttatgacggattcaggaaactgaaaagtcatttgagtgggctaatcttcgccgttacactcaaaggcggcgcggtgggaacgatatttcacagtatcggtcaaatgactatctccagaaatacaggatagaggttatgttcaggcagttgaaaaaaaacctggttgcaaccctcattgctgctatgaccattggtcaggtagccccggcgtttgccgacagcgcagacaccttgccggatatgggaacctccgcaggaagcacactttccattggtcaggaaatgcagatgggcgactattatgtccgccagttacgcggcagcgcgccgttaattaatgatccgctgttaacgcaatacattaattcgctaggaatgcgtctggtttcgcatgccaattcggttaagacaccgtttcatttctttctgatcaacaacgacgaaattaacgcctttgctttctttggcggcaacgtggtgctgcactctgccctgttccgttattccgataacgaaagtcaactggcttcagttatggcgcacgaaatctcccacgtcacccaacgtcacctggcgcgagcgatggaagatcagcagcgcagcgcgccgctgacctgggtcggcgcgttaggttctattttactggcgatggccagtccgcaggcggggatggcggcgctgaccggtacactggcgggaacgcgccaggggatgatcagtttcacccagcaaaatgaacaggaagcggaccgcattggtattcaggtgctgcaacgctcgggattcgatccgcaggcgatgccgaccttcctcgaaaaattactcgatcaggcgcgttactcttcgcgcccgccagaaattctgctcactcacccactaccggaaagccgtctggctgatgcccgtaaccgtgccaatcagatgcgcccgatagtggtgcaatcgtcagaagatttctatctggcaaaagtgcgcacactggggatgtacaattcagggcgtaaccaactcaccagtgatttgctggatgaatgggcgaaaggaaacgttcgtcagcaacgagcggcgcaatatggtcgtgctttacaggcgatggaagccaataaatacgacgaggcgcgtaaaacgctgcaaccgttactggcggcagaacctggcaacgcatggtatctcgatctggctaccgatatcgatcttgggcaaaacaaagccaatgacgctatcaatcgcctgaaaaatgcccgcgatttgcgcaccaatccggtgttgcagctcaacctggcgaacgcttatctgcaaggggggcaaccacaggaagcggccaatattctgaatcgctacacttttaacaataaagatgacagcaacggctgggatttactggcacaggcggaagccgcactaaataaccgcgatcaggaactggctgcgcgagcagaaggttatgcgctcgccgggcgactcgatcaggctatttccttgttgagtagcgccagttcgcaggtgaaattaggcagcctgcaacaagcgcgttacgatgcgcgcatcgaccagttgcgccagctgcaggaacgctttaagccttataccaagatgtaattcgcattaaaggaagaacaatgaccaaacaggtaaaaatctaccataacccacgctgttcaaagagccgggaaacgctgaacctgctgaaagaaaacggcgtggagccagaagtggtgctctaccttgagacacccgccgatgcggcaacgctgcgtgatttgctgaaaatgctggggatgaatagcgctcgtgaattgatgcgccaaaaagaggatctttataaagaactgaacctggctgacagttcgcttagcgaagaggtgctgattcaggcgatggtagagaatccgaagctaatggaacgcccgattgtggtcgcgaatggcaaagcgcggattggtcgtccaccggagcaggtactggaaatcgtgggttaagatgtgctccatcgctagttgaagcacattgccggatgcgacgcttgccgcgtcttatccggcctacgaatactatggattaacttcgcgtaggtcggataaggcgttcgcgccgcatccgacaataaacaccttatctacaacttcagaatttctttcacaaacggaatggtcagcttgcgttgcgcggtaatcgacgcacgatccagctgatccagcgtcataaacaacgtgcgcatttctctgtcgagccgcttcagcaagaaacgccccacatcttccggcagttcaaaaccacgcaaacgcgcgcgtaactgtagcgcctgcaacttatcttcatcagaaagtggctgcaatttgtagatctgcccccagtcgagacgcgacgcgagatccggtaatcccagattcaactgccgcggtggacgatcgccggtgatcaacaaccgtgttttgcccgattccagaattcgattgtagagatcgaaaatcgccatctcccacaactcatcgccggcaatacactcaatgttgtcaatacagaccagcgacaaatgctccataccgtcgagcacttccggaacaaaccaggtacgtttatccagcgggacatagcccaccgcatcgccacgctgcgacaattccgcgcaagccgcgtgcagcagatggctgcgccccgcgccttcgcgtgcccagagatagatgtaaccgctatgttcctgacgcagcacgttttgcagcgcggccagtaaagaggagttatcccccggccagaaacttgcaaaggtttcgtcgtcaggaagataaagtggcaaagagagctgtgccggtgtgttcagagatacctcaaccaggatttcacaaaatcgcgagaagtttaccacagaatcccatgatgtttgaaccgggcagcaacactgcccggtcggtacattatttgtctgttatatccgcgtcttctgcgtccagcaccacttcttcagggcgcagcatactaatcagtttgaagatcaaacttaagccgataccgacgatggtcgccagcgccatacctttcagctccgccgcgccaatgtttaccttcgcgccactgacgccgatgatcaaaataacggaagtcaggatcaggttctgtgctttgttgtaatccactttcgattcgatcaacacacgaataccggaagcaccgatgacaccgtaaagcagcagcgaaacgccgcccatcaccggcaatggaatcatctggatagcagcagccagtttaccgacgcaggaaagcaggatagcgaaaatcgccgcaccgccgataacccaggtactgtaaacacgggtgatcgccatcacgccaatgttttctccgtatgtggtgtttggcgtggagccaaagaagccggagatcacggtcgacaagccgttagcaaacatcgaacggtgcagacctggatcgcgcagcagatcttttttgacgatattagccgttacgaccaggtgccctacgtgttcggcaataaccactaacgccgctggcagaatagtcagaatggcaaaccactcgaagcgcggcgtatagagggtcggcagcgcaaaccagtgagcattaataatcggcgtggtatcgacaattcccattgcgaaagagagcgcgtaccccaccagcacgccaattaaaatcgggataattgccaggaaaccacgaaacagcacggaacctaaaaccgtgaccgccagggtggtaatagagatgatgatggttttggagtctggcgtttgcccttcagccgggagtaaacccgccataccggcagctacgcccgccagctccagaccgatgacggcaacgattgcgcccattgccgcaggtggaaacagcacgtccagccagccggtccccgctttcttcacgataaaagaaaccaggcagaacagcacgccgcacataataaagccgcccagcgcgacttcataccctaacggcaacagtaacaataccggtgaaataaaggcaaagctggaaccaagataagccggaattttccctttacagatgaagagatacagcagtgttcctataccgttaaataacagtacagtcgccgggttaatatgaaataagacgggcaccaggacggttgcaccaaacatggcgaacaaatgttgcaaactaagcgggattgtctgtaaaagtggcggtctttcactcaccccgatagcacggcgcgtcatagtattatcctctgtattatgtgttataggcgctttactcaaaaaaaagccgactcttaaagtcggctttaattatttttattctttatttcgtaccaaagattttgtcaccggcatcgccgaggcccggaataatgtatccgtgctcgttcagtccctggtcaatcgatgcagtatacagttcgacgtccgggtgcgctttttccagcgcagcgataccttctggtgcagctaccagcaccagaactttgatgctgctgcagcccgcttttttcagcaggtcgatggtcgcgataacggaaccaccggttgccagcattgggtcaacgatcagcgccatacgctcatcgatgttagaaaccagtttctggaagtacggtaccggctccagcgtttcttcattacggtacataccgacgacactgatgcgcgcactcggaacgttttccagcacaccgtccatcatcccaagacccgcacgcagaattggcacaacggtaattttcttacctttgatctggtcgatttctaccgggccgttccagccttcgatagtgactttttccgtttcgaggtcggcggtcgcttcgtaagtcagcaggctacccacttcggaagcgagttcgcgaaagcgcttggtgctgatatcttgctcacgcatcagtcccagcttgtgtttgacgagtgggtgtttgacttccacgatcttcatactctttctcctttgaggggcagccacaaaaaaaatcgacggattatacctcctttcttcaaggcggcaatattattttcgttgactttagtcaaaacgataacggttttagataaagttattttatattcaaatggttatgaaagaagattattccatccgaaaacgatcctttgccctggtacaagtattctttcgccgcgcgcctggggaaaagacgtgcaaaaaggttgtgtaaagcagtctcgcaaacgtttgctttccctgttagaattgcggcgaattttatttttctaccgcaagtaacgcgtggggacccaagcagtgaccgataaaacctctcttagctacaaagatgccggtgttgatattgacgcgggtaatgctctggttggaagaatcaaaggcgtagtgaagaaaacgcgtcgtccggaagtgatgggcggtctgggcggcttcggtgcgctgtgtgcattgccgcaaaaatatcgtgaacctgtgctggtttccggcactgacggcgtaggtaccaagctgcgtctggcgatggacttaaaacgtcacgacaccattggtattgatctggtcgccatgtgcgttaatgacctggtggtgcaaggtgcggaaccgctgtttttcctcgactattacgcaaccggaaaactggatgttgataccgcttcagcggtgatcagcggcatcgcggaaggttgtctgcaatcgggctgttcactggtgggtggcgaaacggcagaaatgccggggatgtatcacggtgaagattacgatgtcgctggtttctgcgttggcgtggtagaaaaatcagaaatcattgacggatctaaagtcagcgacggcgatgtgctgattgcactcggctccagcggtccgcactcgaacggctattcgctggtgcgcaaaattcttgaagtcagcggttgtgatccgcaaaccaccgaacttgatggtaagccattagccgatcatctgctggcaccgacccgcatttacgtgaagtcagtgctggagttgattgaaaaggtcgatgtgcatgccattgcgcacctgaccggcggcggcttctgggaaaacattccgcgcgtattgccagataatacccaggcagtgattgatgaatcttcctggcagtggccggaagtgttcaactggctgcaaacggcaggtaacgttgagcgccatgaaatgtatcgcaccttcaactgcggcgtcgggatgattattgcccttcctgctccggaagtggacaaagccctcgccctgctcaatgccaacggtgaaaacgcgtggaaaatcggtatcatcaaagcctctgattccgaacaacgcgtggttatcgaataatgaatattgtggtgcttatttccggcaacggaagtaatttgcaggcaattattgacgcctgcaaaaccaacaaaattaaaggcaccgtacgggcagttttcagcaataaggccgacgcgttcggccttgaacgcgcccgccaggcgggtattgcaacacatacgctcatcaccagcgcgtttgacagtcgtgaagcctatgaccgagagttgattcatgaaatcgacatgtacgcacccgatgtggtcgtgctggctggttttatgcgcattctcagcccggcgtttgtctcccattatgccgggcgtttgctgaacattcacccttctctgctgccgaaatatcccggattacacacccatcgtcaggcgctggaaaatggcgatgaggagcacggtacatcggtgcatttcgtcaccgatgaactggacggtggcccggttattttacaggcgaaagtcccggtatttgctggtgatacggaagatgacatcaccgcccgcgtgcaaacccaggaacacgctatttatccactggtgattagctggtttgccgatggtcgtctgaaaatgcacgaaaacgccgcgtggctggatggtcaacgtctgccgccgcagggctacgctgccgacgagtaatgcccccgtagttaaagcgccagctctgccgctggcgtttttcaattcacctgtaaatcgcaagctccagcagtttttttcccccttttctggcatagttggacatctgccaatattgctcgccataatatccaggcagtgtcccgtgaataaaacggagtaaaagtggtaatgggtcaggaaaagctatacatcgaaaaagagctcagttggttatcgttcaatgaacgcgtgcttcaggaagcggcggacaaatctaacccgctgattgaaaggatgcgtttcctggggatctattccaataaccttgatgagttctataaagtccgcttcgctgaactgaagcgacgcatcattattagcgaagaacaaggctccaactctcattcccgccatttactgggcaaaattcagtcccgggtgctgaaagccgatcaggaattcgacggcctctacaacgagttgttgctggagatggcgcgcaaccagatcttcctgattaatgaacgccagctctccgtcaatcaacaaaactggctgcgtcattattttaagcagtatctgcgtcagcacattacgccgattttaatcaatcctgacactgatttagtgcagttcctgaaagatgattacacctatctggcggtggaaattatccgtggcgataccatccgttacgcgctgctggagatcccatcagataaagtgccgcgctttgtgaatttaccgccagaagcgccgcgtcgacgcaagccgatgattcttctggataacattctgcgttactgccttgatgatattttcaaaggcttctttgattatgacgcgctgaatgcctattcaatgaagatgacccgcgatgccgaatacgatttagtgcatgagatggaagccagcctgatggagttgatgtcttccagtctcaagcagcgtttaactgctgagccggtgcgttttgtttatcagcgcgatatgcccaatgcgctggttgaagtgttacgcgaaaaactgactatttcccgctacgactccatcgtccctggtggtcgttatcataattttaaagactttattaatttccccaatgtcggcaaagccaatctggtgaacaaaccactgccgcgtttacgccacatttggtttgataaagcccagttccgcaatggttttgatgctattcgcgaacgcgatgtgttgctctattatccttatcatacctttgagcatgtactggaactgctgcgtcaggcttcgttcgacccgagcgtactggcgattaaaattaacatttaccgcgtggcgaaagattcacgcatcatcgactcgatgatccacgccgcacacaacggtaagaaagtcaccgtggtggttgagttacaggcgcgtttcgacgaagaagccaacattcactgggcgaagcgcctgaccgaagcaggcgtgcacgttatcttctctgcgccggggctgaaaattcacgccaaactgttcctgatttcacgtaaagaaaacggtgaagtggtgcgttacgcacacatcgggaccgggaactttaacgaaaaaaccgcgcgtctttatactgactattcgttgctgaccgccgatgcgcgcataaccaacgaagtacggcgggtgttcaactttattgaaaacccataccgtccggtgacatttgattatttaatggtgtcgccgcaaaactcccgccgcctgttgtatgaaatggtggaccgcgaaatcgccaacgcgcagcaagggctgcccagcggtatcaccctgaagctaaataaccttgtcgataaaggcctggttgatcgtctgtatgcggcctccagctccggcgtaccggttaatctgctggttcgcggcatgtgttcgctgatccccaatctggaaggcattagcgacaacattcgtgccatcagtattgttgaccgttaccttgaacatgaccgggtttatatttttgaaaatggcggcgataaaaaggtctacctttcttccgccgactggatgacgcgcaatattgattatcgtattgaagtggcgacgccgctgctcgatccgcgcctgaagcagcgggtgctggacatcatcgacatattattcagcgatacagtcaaagcacgttatatcgataaagaactcagtaatcgctacgttccccgcggcaatcgccgcaaagtacgggcgcagttggcgatttacgactacatcaaatcactcgaacaatctgaataaccctatgccaatacacgataaatcccctcgtccgcaggagtttgctgcggtcgatcttggttcaaacagttttcacatggtcatagcccgtgtggtagatggtgccatgcagattattggccgcctgaaacagcgggtgcatctggcggacggcctggggccagataatatgttgagtgaagaggcaatgacgcgcggtttgaactgtctgtcgctatttgccgaaaggctacaagggttttctcctgccagcgtctgtatagttggtacccatacgctgcgtcaggcgctgaacgccactgactttctgaaacgcgcggaaaaagtcattccctacccgatcgaaattatttccggtaatgaagaagcccgtctgatttttatgggcgtggaacatacccaaccggaaaaaggtcgcaaactggttattgatattggcggcggttctacagaactggtgattggtgaaaatttcgaaccgattctcgttgatagccgccggatgggttgtgtcagctttgcccagctttatttccctggcggggtcatcaataaagagaattttcagcgcgctcgcatggcggcagcacaaaaactggaaacgttaacctggcaatttcgaattcagggctggaacgtggcaatgggcgcttccggtaccataaaagccgcccatgaagtgttaatggaaatgggcgagaaagacgggataattaccccggaacgtctggaaaaactggtaaaagaagttttacggcaccgtaatttcgcatcgctgagtttaccaggtctttccgaagagcggaaaacagtcttcgttcctggactggcgattttatgcggtgtgtttgatgctttagccatccgtgaactgcgcctttctgacggggcgttacgcgaaggcgtactgtatgaaatggaaggacgtttccgtcatcaggatgtgcgtagtcgcactgccagcagcctcgccaaccagtatcacatcgacagcgaacaggcccgacgggtgctggataccactatgcaaatgtacgaacagtggcgggaacagcaaccgaagctggcgcatccacaactggaggcgctactgcgatgggccgccatgctgcatgaggtcgggttgaatatcaaccacagcggtttgcatcgccactccgcttatattctgcaaaacagcgacttgccgggttttaatcaggaacagcagttgatgatggcgacactggtgcgctatcaccgtaaagcgattaaactcgacgatctgccgcgctttaccttgtttaagaagaaacagttcctgccactgattcagctattgcgccttggcgtattactcaataatcaacgtcaggcaaccaccacaccgccaacattgacgctgattactgatgacagtcactggacactgcgtttcccgcatgactggtttagtcagaatgcgctggtactgcttgatctggaaaaggagcaagaatactgggaaggcgtggctggctggcggttgaaaattgaagaagaaagtacaccagaaatcgccgcttaatgctttgcgggccgacgagaaatgtcggcccgcattattcaggcactttcgcgaatgggttcgatttcattcagcgtatcaattaacggttgcggcttaccaataagataaccctgcatataatcgatccccaaagagagcaccgcctcgcggatctcttcgttttcaacgtactctgccactacccgcattttcttcattcgcgccaggtggcaaatcgacgccactatctgataatccagactatttgacacaatattgcggataaaactgccgtcaattttaagcagatcggcattcacatttttaagccgcgcatagctggcgtagccagtgccgaaatcatcaatcgcaatctggcagcctaattcctgaagatgctgcaaggtgatttgcgcctgcttaacattggtcagagcattactttcggtgacttcaaaaataagttgccacgcttcaatctgatatttagccagcagctgactgacttcaacaggaaaacgagcctgacataccgaggttggagacagattaatagcaaaacggtgagcgggcatcttcgctctgttttcagccataaattgcagcgtatgctcaatgacccacatgtcgatactcgacgataaaccaaattcgtgcgcgaccggtaagaagctatcggggctgatcagttcatcattctcacctttcatgcgcagaagaatttcatggtagacatcaccacgcataccggtaatcggctgggccatcaggaaaaaatggttgtgttccagcgcccgctgtagccgattcatcatcgcgactttatctttcaattcgcgttgcaaatacattgctccgcgacgctgcatattttccggggcgttggtcacgatagaaagttcggccactgtatttagctctcccagcagcaggtagatatgattcactggcgagcgcacatagcagtaactgacgccaatctgcggttgcatcggcattccatcccaaaagaaacgaaattgcttaagatggctatccagtgcggtaatgcgctcctggtgcgattctgtattcagccgcagcgcgagatcgttacccgaaagctgataaacatcttcacccggttccaacaatggtgacagccagtgagaaagtttttgcttgtattgaatccgcagcatgatgccataattcttaaccagcatttccatgccagggatgcgtaaataacaaagcgcagaccagggggcatcacgtaacgcgcgattcagggcgcgaacatttggcagatgaaccaccgggtccacatacgcaagccgctgaatgcgtctgactaccgctcgctgacgggttgccagtacagccatataattgacaataaaagagaataccagataactggaggaggttatggtcagctgcgtggtatagccaggataaatgggaatgtaattttgatagctgtggatgctgatcatcaacacgaccgcccagagcaatgaaatcagcttataaccatagcgcatcgctccccacatcatcaggggcagcaataatgacaaggtgtaattggtgctaaaaatcgtgcttttttcatttaacggcatgcataacagcaacaataaagcacctaatgccagtagccagattgcgaactcttttttggtaaccttggcatcaacctgctgttttaattgcgaataatagctacgtaaataaaacggatttcgcaccacccgaatgatgaagtagcacagcgggacaccaatcagattacccaccagcaaggcctgataattgattaaggtcccgaggttaaagggcatgacgccgaccagattttctctgctcgccagtaatccaacaaacgcagcaaactggaaaagtatcagaaacagcgttgcaggaaacacaatctgccagaatagtcgctgggaaattaaacggctatcaccatgtgaaacgttgttacgccggggagtaaaaaccctgtaaccgccccaacagagaatgataatgataataaaattagccgttaatgagagcgtttcgtaaaaacccagctctgcatatttgcggacaaaaatccctaaggcgatccctggcaatgccgcccagctgaaaaacatcatcatgctgatcatcagtgccagtggcagataaaagagaaaaacttcaccggaagaaatatgcgcgaaagtattaatgtgggcgaaaatgggcaagattaaagaaggcaggaacagcggaagcccccaccatttatcacgtatttttatataagttgcattcagtttcatagatgctcagcagaatcccccacatcctgaaggaggtgtattcagacaggcatcccacctgacttcgaatgatgattattcatcactatagagagcaatgattctaagtgtcatatgaaagttccaattgatatatatcaaacaaaataaccctgattaatgaattattacgtttatcatgttaactcatcattattacatcatcattgtaaataattaaattaacttccataacattaaaatatgtatccactgacgcttttttacataacgaagaattgaccattttgtcctgttgtgccttaatgtaagtaccgtccacggcgtgggacatacttcaaggaaccttttgtgagtcaggcaaccagtatgcgaaaacgacaccgatttaacagtcgcatgacccgtatcgtactgctcatcagctttatcttcttctttggccgttttatctactcgtccgtcggtgcctggcagcaccatcagagcaaaaaagaagctcagcaatccacactctccgtcgaatcaccggtacaacgttagcggttaccttctccactctcacagaacataacggcacctcgctgtcggatgcttttgctctttgagattatcaaagcggcagatattctttcatcttaaattttacgtctttgttctgactgaagttcatcctgttcggctgcgaaataaatacatcattaatacatatgttgtgatgatgtatttttataaattatttcccatatgaattttaataaatttaatctattcctttatacgcaatacatttactttcctcttttgatgatcttaaatgtcttatttttcgtaatgtgtataacaaggaatagtgatgaaattaaaaaaatgtcttctgcctgtggcaatgttagcgtcatttactctggcaggatgccagtcaaatgctgatgatcatgccgccgatgtttatcaaaccgatcaactgaataccaaacaagaaactaaaaccgttaatattatttccattcttcccgcaaaagttgccgtagacaacgcccaaaataaacggaacgcacaagccttcggcgcgcttattggcgctgtcgctggcggtgttatcggccacaacgtcgggtctggcagcaattccggaacgacagcaggtgcagttggcggcggagctgttggcgcagcagcgggttctatggtgaatgataaaaccttagtggaaggtgtttctttaacatataaggaaggcaccaaagtgtatacctccacccaggtgggtaaagagtgccagtttacgacaggtttagccgttgttattaccacgacgtataacgaaacgcgtattcagccaaataccaaatgtcctgaaaagagctaataatcaggaggagtcatgaagaaagtttttctttgcgccatcttagcctccttaagctatccggctatcgcctcatcattgcaggatcaactctcggctgtcgcagaagcggaacagcaaggtaaaaatgaagagcaaaggcagcatgacgaatgggtcgcggagcgcaacagggaaatccagcaagagaagcaacgtcgcgcaaacgcccaggccgcggctaataaaagagcggcaacggcagcagcgaataagaaagctcgtcaggataaactggacgccgaagccactgcggacaaaaaacgcgatcaaagttatgaagatgagctacgtagcttagagattcagaagcaaaaactggcgctggcgaaagaagaagcccgcgttaagcgcgaaaacgaatttatcgatcaggaactgaagcacaaagctgcgcaaaccgatgtggtgcaatctgaagctgacgcaaacagaaatatgactgaaggcggtcgcgatctgatgaaaagcgtgggtaaagcagaagagaacaaatcggacagctggtttaactaagcgatgtcagtaacttcaagcctatgattcgtgagtataaaaaaccctctgtagtaacagagggttttgttcattcatagtacagggttcaaatcattcccactcaatagtcgctggcggcttgccgctgatgtcatacaccacgcgggaaataccgttcacttcattgataatacggttggaaacgcggccgaggaagtcgtacggcagatgtgcccagtgtgcggtcataaagtcgatggtttcgacagcacgcagagagacaacccagtcatacttacgaccatcgcccattacgccaacggaacgtactggcaggaagacggtgaacgcctggctgactttgtcgtacaggtccgctttacgcagttcttcaatgaagatggcgtcagcacggcgcagcaggtcacaatactctttcttcacttctcccagaacacgaacgccaaggcctggtcccgggaacgggtgacggtacaacatgtcatacggtaggcccagctccagaccaatcttacgcacttcgtctttgaacagctctttcagcggttcaaccaggcccatcttcatctctttcggcaggccacccacgttgtggtgagatttgatgacgtgtgctttaccggttgcagaagcagcagattcgataacgtcagggtagatggtgccctgcgccagccacttcacgtcttccagtttcagcgcttcttcatcgaatacttcaacgaaaacgcgaccgataattttacgttttgcttccggatcgttttcgccagccagcgctgacaagaagcgatcttctgccggtacgtgaacaatgttcagaccaaagtgatcgccaaacatatccagaacctgctctgcttcgttgagacgcagcaggccgttgtcgacgaatacgcaagtcaggtttttaccgatagcgcggtgcaacagcattgcggtaacggaggaatccacgccaccagagaggccgaggatgactttatcgtcgcccacttgctcgcggatgcgggctacagcgtcgtcgataattttcgctggcgtccacagggcttcacactggcagatatcacgcacaaaacgctccagcatgcgcataccctggcgggtgtgagtcacttccgggtggaactgtacgccatagaagcgtttttcttcgttggccatgatggcaaacgggcagctttcggtgctggctacggtgacgaagtcggacgggatagcggtaactttatcgccgtggctcatccagacgtccagcagcggtttaccatctgcggtcagcgcatcttcgataccgcgaaccagtgcgctgtcgtttacgacttcaacctgcgcgtagccaaattcacgttcgttagaggcttcaacgtgaccgcccaactgcattgccatggtctgcatgccatagcaaacgccgaataccggtacgcctgcttcaaagacatactgcggcgcacgcgggctgttttcttcggtggtgctttccgggccgccggaaagaataatgccgcttggattgaagtcacgaatttgtgcttctgtcacatcccacgcccacagttcgcagtaaacacccagctcacgcacgcggcgcgcaactagttgagtgtactgagaaccgaagtccagaatgaggatgcgatgcttatgaatgttttccgtcattgacgcttattccgaggcaagtgaaacagataatataaatcgcccgacatgaagtcgggcgaagagaatcaggagcccagacggtagttcggggactctttagtaatggtcacgtcgtgaacgtggctttcctgaatgcccgcaccgctgatacgtacaaactccgctttagtacgcagttcgtcgatagtaccacagccggtcaggcccatacaggagcgcaggccgcccatctgctggtgaatgatctctttcaggcgacctttataggctacgcggccttcgataccttccggcaccagtttgtcggcagcgttgtcgctctggaagtaacggtcagaagaacctttggacatcgcgcccagggaacccataccacggtaagatttgtaagaacggccctggtagagttcgatttcacccggagattcttcagtacctgccagcatggaacctaccatcaccgcgcttgcgccagcggcgatagctttagcgatatcgcctgagaaacggataccgccgtcagcgataaccggaatgccggtaccttccagggcttctactgcatcagcaacggcggtgatctgcggaacaccgacaccagtcacgatacgcgtcgtacagatagaaccagggccgatacccactttaacggcactgcaaccggcttctgccagcgcgcgggcacctgcagcagttgccacgttgccgccgatgatttgcaggtcaggatatttagcgcgagtttcacggatacgctgcagaacaccttcagagtgaccgtgagaggagtcgatcagcagaacgtcaacgcctgcggcaaccagcgcatcaacacgctcttcgttaccagcgcccgcgccaaccgctgcacctacacgcagacggccttgttcgtctttacacgcgttcggtttacgttccgctttctggaagtccttcacagtgatcatgccgatcaggtggaattcatcatcaaccaccagcgctttttcaacgcgtttttcgtgcatttttgccagcaccacttcacgggcttcgccttcacgcacggttaccagacgctctttcggcgtcatgtaaacgctaaccggctggctcaagtcggtcacaaaacgcacgtcacgaccggtgataatgccgaccagttcgttttcttcggtaacaaccgggtagccagcaaagccgttacgctcggtcagttctttcacttcacgcagcgtcgtggttggcagtacggtctgcggatcggttaccacgccagattcgtgttttttcacacggcgaacttcttctgcctggcgttcaatggacatgtttttgtggataaagccgataccgccttcctgagccagagcaatagccaggcgcgcttccgttacggtatccattgctgcggaaagcatagggatattcagacgaatagttttcgtcagctgagtgctgaggtcagcagtattcggcagaacggtagaatgagcaggaacgaggagaacgtcgtcaaacgtcagagcttctttagcgatacgtagcatgggcaatatctcgaccagagtggttaataaatattgccgcggcattatacagagcgtaaccgattgcatctacccctttttgcaaaaaatgcttgctatccccggagggcgggttactatcgactgaataacctgctgatttagaatttgatctcgctcacatgttaccttctcaatcccctgcaatttttaccgttagccgcctgaatcaaacggttcgtctgctgcttgagcatgagatggggcaggtgtggatcagcggcgaaatctctaattttacacaaccagcctccggtcactggtactttacgcttaaagacgataccgcgcaggtgcgctgtgcgatgttccgcaacagcaaccgccgggtcaccttccgcccacagcacgggcaacaggttttagttcgcgccaatattacactctacgagccgcgcggcgattatcaaattatcgtcgaaagtatgcagccggccggtgaaggattgctgcaacagaagtacgaacagcttaaagcgaagttgcaggctgaaggtttgttcgagctgcaatacaaaaaatcactcccctcccctgcgcattgcgttggtgtgatcacctcaaaaaccggtgctgcgctacatgatattttgcatgtgttaaaacgtcgcgatccttctctgccggtgatcatctactccaccgccgtacagggggatgatgcgccggggcaaatcgttcgtgccattgaactggcgaataagcgcaacgagtgtgacgtgttgatcgttggccgtggcggtggttcgctggaagatttatggagttttaatgatgagcgtgtggcgcgggcgatttttgccagtcgcattccgatagtcagcgccgtcgggcatgaaaccgatgtgacaattgctgactttgttgctgatctacgtgcgccaacgccgtcagccgccgctgaagtggtgagccgtaatcagcaagaattgctacgtcaggtgcaatcgacccgtcaacggctggagatggcgatggactattatctcgccaatcgcacgcggcgctttacgcagatccatcaccgattacagcaacagcatccgcagctccggctggcacgccagcaaactatgctcgaacgtctgcaaaagcggatgagctttgcgctggagaatcagcttaaacgcgcgggtcagcaacagcagcgattaacacggcaactcgtccagcaaaatccgcagtcgcgtattcatcgcgcgcaaacgcgcattcagcaactggaatatcgtttagcagaaaccctgcgcgcacagcttagcgccacgcgtgaacgtttcggtaatgcagtaacacacctcgaagccgtaagcccactgtcaacgctggcgcgcggttatagcgtcaccagcgccgctgatggcgcggtgttaaaacaggttaagcaagtgaaagtgggtgagacactgaccacacgactgggagatggtgtggtgattagtgaagtcagcgccgtaacaaaaacccgcaaatcacgtaaaaaaacgtctaatccgtagaccggataagaggcgccagcatcgcatccggcaataactcccaggctacgccagatccgccatgctggttactggaagcaggtcaccagacccggtttatttattagcgtgatactacaatcctgtgctccagtaccttcgtccatcccacactgttgagaggacaaataaggaaaactgggtgaagacggccatcccagtgaattaaaaacagtatgcaacaactctaattcattgtatgtcggtgcattttctatgctgccacactgccttgcgatatcccatttactggcatcaatgatatgtgcagaagcccagttttcgtagttaataatcggtgaggatacgggattagccccggacggcaattccgtcgttaacaacggtcgatgtagcgatttactattcaccactaccgtgtctgccatatgtccccaaaagtgcgccgaggaaacatttgggctggttggtaccgtaaaaatagcgtccagcgtgtctgtcgcggaagcgtaattagccagagtaaccgtcagtggcgttttataaccaggggtattatcctggcggagcgaaaaacttgccgtcccatccgcgcctgtcatgccactaatggtattaccgctttcactcagcgtaacagccgaacctgataacggctgaacgacgagatcgtccatcgccactacattgccatacaacgttgccccagcgttacgcggcgatgcctcaccacgtttcaaagtaaattcaacattcggcaccgtattcccggcgctgtctttcaccgtcacggtaacggacatggcttcgccttttttcactttcgccgcctgagtggctgcatcaaacgctgttgaggtaagtgtgacgctggaaaccgttgaacgcgcgttagccaggcaaggctgaaatgattttgttgaacccgtatacagcgtgccatttctcaaatcaaccgactggtctttaccatcggcggatttatcctctgcccaccaggtgtaatacgcaggccagccagtttcagtgacaaacgtgttattcggataacgcgcagacaacgaacttaaatcattgaatagtggctgccttgctacttcacaagggctcacactcgcatctgatttctgtgttggggtaaagtacggccagtcttcattattgttattgatcttgccgacgccagaagtcgatgtcagttcactccacaatttcgggcgttcaaataccgcaccattcactgccgtcaaggttgctggcatatgcccccagtagttagccttcgcagaatccgggctggtcactaccgtgaatatcaggtcctgattagccgtaacctgcggatttcgcgccaatgaagctgtaaacggcgttaccagaccaacggtgttattttgggtaacgttgaacgttatcgtgccatcactgccggtgaagccgctccatgccgacgtattctggttgaaggagatacgcgccgatgtcggggtgacttcatctaaaatgagatcatctacggtattggaggatacagagatccctgaacggcttttcgcctgcacgcgcttgagcgtaacaccttcgccgccaacaggattaccattggcatctttgatcgtcaccacgatgggaagcatctcaccttttttcacagatgacgtgggggtaccaccattgctggcagttcggccctcatcataggcagtcgatgacagcgtaaggcttgctggtgccgaatgtggctgcgtcagacagagcattaaagcgtatccattaatagtcgtcgtcgattgtcccgttttcaaattaatgacgccgtaataccacgtcaacgcgtcagtggtgctcatttcataagtccaccaatttccacttccggcagttataggcaaccccaaatctgtcagtattgtcccgcctggatgatcattatatagcccctgtaactcattgagacgcggctgatactcaaccgggcaatccggcgtaactttattggtataaaaaaggtatgaccacgactcattattattacttaccgaggaccccaaggtcgcttctgctgccagtagcggtcgtttaaaggtcacccccgccctactggtaaacgtgtcgggcatatgaccccagtattttgctttcggtgagttcggactggttatcacagtgaaaataacatccatcgtggcactttttgtggtgtcgcgcatcaatgttgcagtgagcggagttgccagcccataagtctcgttttgcgtcacatcaaaagtcgctttaccatcacttcctgtcgtcagaagtgcctgtgccccattattatagagtgacatgtttactccggcaggggtgaccggcacgatagtaagatcatcatacgtagaatctagcctgttttttgcacgatccaacgcagtcccgcgtatgagattaaagtttgcgcctggcaacagatttcctccgctatcccgcacaatcaccgtcatccggatcgccgtacctttcgccgccgttgcactagggcgaccatcgttgctggccgttttctccgcatccagtgccgtggaggtcatctctatagaagctgccactgcatgagggtttaccagacaggacacaaatgccacggtgtttgataatgccctggagcttgatccattcgataaattaatagactgatcgtaccagacgttcgcgtaggcaattttatcgtaagcccaccaggtgttagtcagcggaaggcctaaatcggtccctatcgcaccattaggatgttcactgtataactcttgaaattcgcttaataacggttgataaggttcgccgcagtctgatttgctgacatcattttttgctgccgtattcaaagaaagccatgattcattattagccatggttgactgccccgctggatgctcggcagtaagcaatggccgcttaaaggcaattcccgaccgggtagtaaacgtttcaggcatatgcccccagtaacttgccagtggcgtatccgggctggttatgacggtaaacatgaccggtaatttgttggattctatcgtcagctgatacaactgggcgtacatattggttaccaggcccatagaatcatcttgttttaccgtaaaggaggtagtcccgtccgcgccagtcaccccataaagcaggcttgaagaactattcatcctcgcagaagcgcctgccgcgttaattaccgtaatcgacttatttatcatctcggcattttgacggttcttcgagccttcacgtctgagaataaaggggacattgggcacgctatttccctgcgcatttttagtcaccacgcgaatcaccgcgtcttcgccttttttcactttcaacgcactcaaggtgtcgtcaactttgacaaattgcgccgtatcattcgcctcaacaatgatctgactggcaacggcgacaggcgtggtccggcagctcagtaatgcaccaccagatgagggcatctgcgtttcatctcctgtcttcagcgaaacgacatcatacgtaaaggtttgagtgaacgtatctgcaacggtattcgagatatagaacctcgacactggccagccaatagcatcatgtaatgcgctactcccctggtgcgcataaatggccctaagttcattgtcagttggaacatactccgcgccacaaccatttatcgaggtatcgttagcctggcccgacgggaacgtagaccaggcctccccctcttccaccagggtaccgatactggtggtagcactattctcgtccctcagcaaaggccttcgataaataagaccgtcatcgcctgtcgccgtttcagccatatgcccccagaatttggcttttggcgaatccgggctggtaagcaccgtaaagacaacgggaagcgtcgatttagtgctgctggaggaatccaacgctgccgtgagttctgtttttagcccggtagtctggtcttgcttcaatgtgaaagtggtggtgccatcagcccccgtcacgccataaataaccagggtcgttgaaagaaaatcattttgagtatttccccaggcatccgttaccgccagtgaagcaatcgacgtcgtagttgacacattggccctgttcacgctggtgtttcgtttgagggtaaatgcggtatttcccacaggcttaccctgcgcatctttagtggtcactcgtaatacggcttcttcaccctttttcactttgacaacattattcatacggtcaaattttgtgaggtctgcagcttcaagaacgatttggcttgccttaacaatcggcgtcgtctggcaggtaagcagttcttttgtggcagatggaattatcgaactggtgcctgaactgagattgacggccttgaagtcacgctgttccaggctactactacctgtcgtgctggaaaggtaacttgaggcgacgggccagccctgaaccgttttcatcgcatttccgcggttggcttcatacaatgactccagcccggcctgagagggaacatattcactaccacaaccattagaggatgtgcttatagcctgagcttgggtaaattgcgcccagtcttcattatcttccgcaatcgctgttcgacccgacgtactggataactctttcaacaataatgggcgtttaaagaccgctccatctgcagccgtcactgtttcaggcatatgcccccacattttcgccttatcgctgtccggactggttacaacggtaaaaatggtatcgagggtcgcttttttcgttgtatctgaatagagcctagcggtcagcgacgttttcgtgccatgggtatccgggcgggtaatagtgagaattttagttccgtcgctgccggtcatggcgctgtatgctgcagcggtattattaagcgaagtttcgtccgccaggccaccattgaccacaaccggcgcaaccagcgcatcactgctaccagcaacgtgtttttcctctgagcgggtataaccatcgccacgtttcagggtaaagggtatatcacccaatggattgccctgcgcatcttttaccgtcacctttacctgtagcgtttcgccttttttcagcttcgccgcatttgcagccgcgttccactgcgccggatctaccacttccagcgtaatgctgctggcaggattgttagccgtcgtcaggcaactgacataaaccgccgtgctaccgccaacggtccgcgccccatcgttgagggctatggtgtaataatgcggtacctgatctgcgggcgaactgctccagtagggctgacgctgcgttggccagccgtgtactgtctgtacaccgttaccgttattggcatcatagagcgcgctaagctgagaacggcgtgggagcatattggcgccacagccacctttactggtgctggaggcgttggcctggctgactcgcgaccagacttcgttattttccgttaatgtgccgtccggactgaacacttccgcagccagtcggggtcgggcaaaggttaaagcatcgacggtaatcgtctcatccatatgcccccacatctgcgcgccaaccgcatccggactggtgagcgtagtgaaaatcacattgtaattaacagtattgggaatataggagttcacaggcacaatatttagcggcgtcgataagcccacaccttgcgattgcttaatttccacagtcgcaaaaccctgcgcatccgtagtaccggcatagactaaagacggttgcgatgttccgtagagtgtgccattcatctcgattgcgccgcgggttggatcatcaaaacctgtagtctgcccctgacgatttttccccatatctttagtgatggtgaacgcggtatacggcacgggtgcattattcaaggcattaaaggtgcgtaccgtcatggtgatcgtgtcacccactttggcctgcgctctgctgcctgcggaaacatcacgatcggtggtcgcggcaatcttggcgaccatctcattgcccgaacaagagagatagttttgcttaaagccggaataggtgtcgatgttgcccgtggccaggtttaccgacgcgtgcgacgtctcttccaccgcactaagatacgctttttgcaacgttggccagccatattcggtgccgatggcattggctggatgagcggcaaacaaactgtgcaatgaactttggctcggaatatgacctaaaccacactcagcctgcatactgctattctgatcaaacagcgcccagtcttcgttattttcccgcaccgatcccagttcgttgtcggtttcatccgccagccgtgggcgtttaaagatattgttcgcttcaataatgcccaacatatggccccacatccgcgctttgtcggtatcggggctggtgatcaccgtaaaaataacgtctttctcatccgaggcagtaaaatcactgcgcattctcgcggtgatgtgagttttcacccccacgccgcctggctgggtcagcgtcagagtggcctctccgttagcatcagtgatcccttcataggtatgggcgtcaactttgcgaacgttactgccgccatcaatttgtaccggatgcgtctcccacgcggcgtcagtttgattcttacggttaatgccgtcatccagatgcagcgaaaagtagtagtaagccagcggctgatcgttgttcttgctatcggtaatcgtcagacgtaaagaagcctcttcccccacctttactttcatcgcttttatcgtcgaatcatagctgcccggcgtcagtaccagcttcggttcaacatcgggcgcttctttatcgacacagctcacaataaacgtcgtatcgtccggtttttgcgcttcgctgcggttcgaaacatccgccgcatggtgctggccgctcatccccgccagtgatgaccagtagaaattaccctgcatcggccaaccagccacatcctgcactgacgttggcaccaccgtcgccagcgcaccgaactgacgcattccgggcaaaatgtcgcaatgtttatccgcgccgctccaggtaaaggtggaccaggtttcattgtgatcgttaaccgtaccgccttcattatcgacttccgccgccagttttggtcgactaaaagtgtaatcacgggccttcagcgtatcgggcatatgaccccacattgtagcctgcggaacatccgggctggtgaggacggtaaagatcactgccgtttcactggcctgagcaatacccgcgaggctcgcgaccaacggcgtttttacaccagggccgttggcctgggtgaccgtaaccgtggcaacaccattcgcatcggtagtaccacgatattccgtcgcggtggtggttaattcggtcgtgcccagttttacaggcgcagtattgttcaccacaccctggcggttttcagcatctttgcgtttgataacaaaaggaatattccccacaacattaccgacgcaatctttggtggtgaccgttaacgtgatactgcccccaaccgtcattttcgccgcacctgaggattcgtcatagcccgcagcgctgacggaaataaggtcaccctgcgcgggcgcaatcttcagcgtcactttctgatcggcgagcgtcagaacactttcatagggatagcccgtcgaggtgagtaaatataacagcggcatggtctgctggggatcaggctgcgcccaggcgaccagcgaacgcccggcaagtccctgtgcacaaaacgagcgatctgcgactggctgtgggtccagtaaggtgtccggcgtggcggcatccgcccaaactaaagatacagccggtggcgtttggttttcccaacgtggggtggcaatgatatcgccttctctgtcttgcgggttggtgacgagcaatttagagacgctaacatccgcgttgaattcactcggtttagcggtaaacgctacctcatgcgtctttgtaggatccagaaagacactgccctggtagacgggtatgctggcgctgtcggcggtgggcacggtaccgttaaattcgccgaccgtatctgaagagtcttgccatgcagattctgcccatgaccacccaggcagcattgcgcttatcagcaatgcgcataacacaaggattttattcagggtcagggacatgacagaaactccaccggttgttaaacggacgcttgtcgcatcaacatattttgcttaatccgggattaagcaaaatatgcggaaacagcattcccttgcgggaatgctgctgagtacgcgttatttgtgtttgtaaataatgtgaagtttgtaaccctgtaccccgtcgccgttggtcgggatggaaagtgcctcttttccatcgcgcgcagggccgttaaggttggttctggcttcgtcgttggtcgcagggatgaccaaattgttattatcgaagcttgagttaacgatgccacccgaagtgccaagctgttggctgctgccagaaagtacccaacggaagtcataattggcggtgacgtcagcatcggtacccgcatcaaacttgccatttttgttctcatccgagtacagtttggccacgtaggttttgccaagttcgattggtgtgctaccgttgataaggttgatactggtaccatcaacaaagatggcgactttcaggttctggttaaccaccggccccggtgcaacgttatcgctgtcgcttccgccgccgctggcagtagaaacgtcataaagatgcagcgcagtcccgacgtttggcgtaccggtctgcgtggttggcgtaatttcaataccgatatagcgaccacggtcggcatcggtaagagtgtaactggtcaccttcgttgccagctcttttggatcccccccctgcgcatccttgtagctcatccagcggatagtatcgatagttttcgcgttatcgcccaatccaccaagatccacgtcgccttcggtatcaccaatttcccaacttacggttaatttatcacccgagtaaagacgcttgtccgtttcactgccttgcgggcgagcgccttttagatcagaagtcaacgttacacggtcggcatctgtcgtagcacttcccccttccgaatagagccacggaatggtcccctggaaaatattggtttcaccgctgtcgacccaggcgctgtcttcagccagcgccacaggtgccacacaataacctgccagtgccagcgctaatgcgatccgggtcagaccgcgtcttttatcctgcttcattgatgctctccttaatgaaccttcagcgactggccgactggccttacgccaatcttattttttggtatacagcacgcgtaaaccgtatccctgcaagccatctcccgcttgtgcgccataggtttgcgccgcttcacggttagtggccggaatcacaatgtcctcattggaagtgttcgcctgtgcacccacttcaccattgatgctcttgccggtaaattcccacttgtagtcgtactgcaccatctcttcgtcagtcagtttttcgacctgctggaagacaccgtctttattgttgtcgcgccataaaacaaatcgataaatgttgttgagcggcaacggttctttatctttacctatcaggttgctgggtttagccgcccccacacgatagataaaagcatttagcccaccaatttctgccccgaggaaagtgacatccacatagttactgtcatcgtagggcgcggcttttgctttccagcgataggtgccaggtaaggtactggagagggtgacagtgcccttttctttatcttgtttggcaataaaaacgcaggggttatcggtcgagcagggcttgttggttaacgtcactcgtttgtcctgcgcgtcgtaaagctgaggcgtaaggttatcttccggcaacgcatcgccgttgcggtcggtgttatcgccaaagctgtcggttacatcgagatccatcactacaccatcaacgccatctgcctgtgcgctggcttcgtggctgtggttgttctcttctggcacgttcgcgatgttattaacaatcaactctattttacggtcctgctgaacggtgatttccaccacgccagagttctgtcggttgcccttttcatcttccagcgccagacgtactcgccaggtattgagtttttcttgttcggcttgatcggaactgtactgccaggcaggcagcaccaggttccagtggttattgttaccctctgtcagagtattctctttgataaccggcatcaccagcgtgcgggcggcattgtttttcgcctgccaggaggccgcaacgattttgtaatgatgattaatgagtgcgttaatggtccacttacatttttccagaccgacggccgcttcgggagtgtccttaatgacgcactcagggtgctcgttggtggcatccgctttcaaccacagggtgacatcaagcggatctttttctttgtattccagaacaataaagttattacgctcaacgaaatcaagacggctgcccatcagcgagtgcgccgctttcactttatcgctatccaattgatcttttagcggaacgccgaactgataattaagagtggcattaatgctgacatcactgttatctccggtccccgctttatagtccgtcccaactgtcagtaacggcactggttgataattcagtccaagcgttaccgcgtagggatctttctccaaattatccgtaccaaaaagggcgacttcatcgccgtaatattgctcgaagacaattttgccccccagttgcggataagaaggtaaccagacttcggcacgaatatcccaaccgcgcgcagggcgttcttcataaaagtcgaaatcttcagagtctttccagtcagaaagtgggtgataatagttgcctgagaattttaaataatccgtccaggcttcggcgcctaaacctaaacggcgatgtccacgggtaaagtcataatcataaaatatatttccacccaatagatatttatcaaaattataccttaccccaaggccaatattcccgatcgtacgatcttcttttcgttgcgcagaaaattggctgaaataaacagtggtttgattatcgtaccagggaacaaaataatcgatggaactgccatccagatcgccgccctgaccaatggagaggttcaaacggaccttaccgtagggagagagtgtgtcttcaatataagattgtgcggttgaggtgatttgactttgcagatagcttctggcctgagattccagcgcctcaggggtcaagttttcaaacccttgcgtggcggagttgatgacgtaatcggctccgcgctctttcagcgatttacccttgttggtttgttcatcctgttgtgctgcctggctacctaaatcaggtaacgattcgttttgcttaacatttatctctggcgccgcgaaagcagcaccagagataaatgttagaataatacagcgtttccatcgcagcatgcactttccctgtgacaatgatacagtcaaaaataagctttaatattgtatccctgattattcagaaaggcatgtcataaagagtaaatatattcttaattatttaaattagtgatttcactcaaatacattagttattccactaataacagattgtttatcattcatatattaaatataaatgataaaacaatacattcacatgatattaagcaataataaattcaacgcgttttttagatattaaaccgtgcccatgttggcagaaataatccacagcaccacaagcttttaacacttgtaacgcctgatgacactcagggcaaagtgcctggacggtaaagtctttgtcgcaagttgcacagtgagcagtctcgccattgcgttcgagaggggttttgcaggttggacagttgagtgccataaatactcctcgcgtgttattcggcttccctctccgtgtggaaagggaaaccagataagtgattacttacttttcttgatatgcttcatcagacgcttacgtttacgcatctgggttggcgtcagggtgttacgcttgttcgcatacgggttttccccttctttgaactgaatacgaatcggcgatcccattacgtccagcgatttgcggaagtagttcatcaggtaacgcttgtaggaatcaggcaggtctttcacctgattgccgtgaatcaccacaatcggcgggttataacccccggcgtgggcgtatttcagcttcacacgacgaccgcgtaccagcggtggttggtgatcttcaacagccatcgtcatgatgcgcgtcagcatagaggtccccacacgacgggtggagctgtcatacgcttcacgtactgattcaaacaagttaccaacaccactgccgtgcaaggcagagataaagtgcacacgagcaaaatcgataaagcccagacggaagtccagcgtctctttcacctgctctttcacttcctggctcaggccgtcccacttgttcactacaatcacaagtgagcgcccactattgagaataaagcccagcaaggagagatcctgatcggaaataccttcacgcgcatcaatcaccaacatcaccacgttggcatcttcaatggcctgcaacgttttgattaccgagaatttctctaccgcatcggtgattttgccgcgtttacgtacgccagcggtgtcaatgagcacatactcacgtccgtcgcgttccattggaatgtagatactgtcacgcgtcgtgccaggcatgtcgtaaacaacaacgcgctcttcaccaagaatacggttagtgagtgtagacttacctacgttcggacgacccacaatcgccagtttgatcggcaaactttgcgggtcgaagtcgtcttcctcttcttcttcgccgttctcttccgcttcaaattgcgcccagtattcggcgtcttcgtcgacttcttcttgcggtgcgagatcttccatccacggcagcagcacgtgctccagcagacttaatacgccacgaccgtgagacgcggcgatcgggtagatttcacctaaaccaagcgcgtagaaatcaaccacggcctgatcgggatccagaccgtcagttttgtttgccaccaggaaggtcggtttttcacgggagcgcagatgtttagcaatcgcttcatccgccggcatcaggcccgcgcgcgcatccaccataaacagtacgacgtccgcttcttcaatcgccagcagcgactgttccgccatgcgggtttctacaccgtcttctgtgccatcaatcccgccggtatcaatgcagataaactcacggccttcaatttccgcacgaccgtacttacggtcacgagtcagacccgggaaatccgcaaccagcgcatctcgggtgcgagttagacggttaaataacgtggattttcctacgttagggcgcccgacaagcgcgaccacaggtaccatgtttaaagcctcatttttataaatcatcagacaacgcacgctatattcgtgtcgttgttaaaaacaggaaaacggcccctgtccaggagccgttttcaaagtgaacgacagagacgattaacgtgtaatagagtacacggttccgtcttttgcctggatcagcagtttgccgtcagcagcaaccggttcagtctggaaaccggaactatcaactttttgctgggcaacgaaacgaccatcttcgacgttaatccagtgcagataaccttcactgtcgcctaccaccaggttgccattatacagcaccggagaagtcagcaggcgatgcagcagatcgctttgtgtccacagcgtaacgccgccatcaatggtcaacgccatcacccggtcattttgatcgaccagatagatgcgattgccgtcgacgatgaaatcattcaccgaacccagttcgcgtttccacataatctgaccactgcgcagatcaagcgccgtcaggttaccattataggccagcgcgaaaacaacaccgttaacaacgacgggagtcgtgtcaacatcgctcagacggtcaatttcggtagaaccggtcgcctgggaaatacgctgctgccaaatcatctggccctgttccatcagcactgcgctgacgcgaccattatcgccacccacgacggccgcaccaaaagccgttgccggcgcagactcgccacgcaaagagagcgaaggcatatcgaggttaactgtccatttgacagcgccgtcagcttcgttcagcgcttgtaactgaccgttactggtgtggattaacaccagaccgtcgctgaccaccgggcgcgaaagtgcttcacccgcgactttagtttgccatgccacagtaccatcgctggtattcagcgcgtaaacctgcgccttttcggtgccaatgtagacatgcccaccagacacggtcacgccgccagaaagtaatgcaggatctttagagaaccagccatctttctcggccaggttgacagaccagatttctttgccgtcatccgcattcagcgcttttactaaaccagcgcggtccgctgcatagacaacgttgtccgccagtgccggatgaagattggaatagaagttgccaatgccgctaccaacggaagtgctccacgcagtagtcggcgtaaactggttttcaacggttggcaatggggacatctttaccacatcttcttcgctgttaaacagcgaacagccgcttaaaagggtaacggaaagcagtcctggcagcagtaatttacgcaattgcatcgggtccctctcagatggacaaattattaattttcatctgcatcatttcgctcagtgccggggtaacatcgcttttcacgcctgcttcccatgcactacgcgcaccttgcttatcacctttgctcagcaatgcttcaccacgcaggtcggcaacaatggcagcccacccttcacctttgatagcatcaagggtttttagcgcggcatcagcctgcttgagctgtacctgaacgcgagcaagacgcagatttatcacggctttgagattttcatcgctcgtgtctgccagcccctgttgtaactgggcggcagctttctctagttcatttttgtcaacaaattgctgcgcaagttccaaagaagccagcgcaccataagtatttttattttcagcagcaaatttttccgccgctgggatgctatccggtttgccttcgctcactgcggtaaccgcattttgataggcaagagaagcggagcgtgcagaatcaacctgatggctgttccagtagcgccagccaatcagtgcgccaacgcccaaaatcaccccaacagccagtgctttgccattttcagcaaaaaagcgtttaaccgcttcaacctggtcgttttcgttctcgtaaatttccacgctgtccttctccttccttaacccagtaacgtgcgcaaatgcgcggctacgctatcctgcgcaactgcagtttgctcaccagagcgcaaatccttcactactgctgtgccgttagccacttcagactcacccagcaccacagcaacgcgggcaccccatttatcagcacgggcaaactgtttcttaaagttgccgccgccgtggttggtcatcagtttcacgcccggtaattcatcacgcagacgctctgctaatgccatagccgcagattgtgtgtcagcacctgaagccaccaggtatatatcgacaacaggatcggctttaaattccggattaacggcctgaactaacaatacaagacgttcgaggcccatcgcaaaaccgactgccggtgttgcacgaccacccagttgttccaccagaccgtcataacgaccacctgcacacacggtgccctgggaaccgaggctgttagtcacccactcgaaaacggtacggttatagtaatccagaccgcgcaccagacgctggtttacggtgtaagcgatccccgcgctctcaagcagtttgcacagaccggcaaagtgctcacgagattcctcgtccagataatcgcctaatgccggagcgtcgttgagaagcgcctgcacttccggattttttgaatccagtacgcgcaacgggttagtgtacatgcggcgtttgcagtcttcgtccagcttttctttatgctgctcaaggaatgccaccagcgcatcgcggtaattcgcacgagcttccagcgaaccgatagagttcagctcaagagttacgtgctcggaaatacccagcgcgcgccaccagcgggcagtgagcataatcagttcggcgtcgatatccggaccttgcagaccgaaaacttcgcagcccaactgatggaactgacgataacgccctttctgcggacgctcgtgacggaacataggcccgatataccacagacgctgttcctgattgtacagaagaccatgctcgatgccggcgcgtacacagcccgccgtcccttcagggcgcagagtcaggctgtcgccattgcgatcctcaaaggtgtacatctctttttcaaccacgtcggtgacttcaccaatcgcacgtttgaatagcggggtctgctctacaatcggcaagcggatttcactgtaaccgtagctgccgagcacgtttttcagtgtgccttcaatgcgctgccagatggccgtttcgccaggcaggtaatcgttcatgccgcgaatggcttgaatgttttttgccacgtttattctctttctgaatataaaaatgaaccctcaacgcttccctcaatgtttcgggagccatgcgggttcaatcatacacgggaagcgaggcgcttcccatcacgttattatttttcaacctgctgaacgtcaattcgacgcgcttcgtccagctgactggctttcgcacgaatgcgcgcttccagctgatcgatcatatcgttgttgtccagacggtctttgcgcacgccatcttcatagaggccgcttttcttgttgccgccagtgacgccgagtgtagaaaccagcgcctcacctgggccattcaccacgcagccgataatcgaaacgtccatcggagtgatgatatcttccaggcgttgctccagcgcgttaaccgtaccgataacatcaaattcctgacgcgaacaggtcgggcaggcgatgaagttgatcccgcgcgaacggatgcgcagcgatttcaaaatatcgaaaccgactttgatctcttcgaccggatcggccgccagcgatacgcgcagcgtgtcgccgatgccttcagacagcagcagacctaaaccaatagcggattttactgccccgctacgcgcaccaccggcttcggtgatccccagatgcagcggctgatcgatttgttttgccagcaaacgataagactcaacagcgaggaagacgtcagacgctttcacgctgactttgaactgatcgaagttcaggcgatcgagatgatcaacatgacgcatggcagattccagcaacgcctgcggcgtcggttcgccatacttttcttgcagatctttttccaacgatccggcattaacgccaatacggatcggaatgtttttatcgcgcgcacagtcaaccaccatgcgaatacgctcttcattaccgatattgccagggttaatacgcagacaatcgacgccgtattccgctactttcagcgcaatgcgatagtcgaagtggatgtcagccaccagcggcacgttaacctgctgtttgatgagtttgaacgcttctgccgcgtccatcgtcggtacggagacacggacgatatcagcgccaacacgttccagcgccttgatttgattgaccgttgcttcgacgtctgtcgtacgcgtattggtcatggactgtacggcgatgggagcaccatcgccaatcggcacattcccaacgtaaatacgtgttgattttctacgttgaattggagcctggttatgcatgaaaaatctcccgcgttacccgtctgttactgcgccggtgattgttcggcattgagggtcagacgcgcaacctggttagttctgataaaacgactcagatcgacaggtttcccttgatactggatctgtactgcggctggcgcaccaattttcagtttgtacggtgcctgcccggttaagttcaaattaccgtctttacgctgcataccgctaaacagttttttaccggtagcatcggtgacttccagccagcaatcggcagtaaagttcatcaccagcgcattcgggtcaaccgccggcgtggtcacgccagcctgatcggttggcaacggcgcagcgccatctggtgttgttgttgccgctggtgccggagtcgcagcggtatcaacatttgcctgcgaaggtggaacaaccgcattctgttgcggatcaacagctggtgctggcgcagttacggcaggtgtttgcgtgttggttgcggtggtatccacaggtgatgtcggcgtggtcgccatagcctgatctgtggttgtcgacgtatctaacggtacactctggctttgattattattcagttccgcagaagattgatcggccatagtggtgatctcttcctgctgagctttgtggtcttgccaccaccaggcaccgctcagaccaataaccacaaacaacaccagccaggtgaaggtcatcagccagccgtcacgttttttgcggcgtttaccgagggaaaaactctgcatcggcgcaacttttgcagcccgtagtggagcctgcttttccagccctggcagcagttcttcttctggaatatgtaccagacgcgcataagagcggatatatccgcgcaggaatgttgaagcaagatcggcaggtgccttatcttcttcaatgtcgcgtaccgtggaaaccttcaggcaaagtcgctcggcaacggcctgttgactaagtcctagttgttcgcgagcattacgcaggcgagcgccggtagtaagtgcttcattttggtcgtgcgtggcttcagtattcattcgctgcaggtacgtttaaatgagaattgagatgccggtgaaccatcatgctcacccacaccgcgaaacatccgttaagttaaccgttatcatacagtataagaccgtctgtgtgctcgtgacaaagcccacattcactaaggctaacttactgttgcatcgttacatactgccttaaagtcagcaaaaacgcaccgttaatattgaccagacaattgcaacttaatacttcattcataaaagattacgccacggtacataaagtaaccgtggcgtaatggctatcagaccgctttaatatcgatggcttcaccctgcatccgtttacgcagggtacgtttcgtacggtcgataacatcgcccgccaactgaccacaggcagcatcaatatcatcaccacgagttttacgcacaatagtggtgaaaccgtagctcatcagcacttttgagaaacggtcgatacggctgttcgaactgcgtccatacggcgcgccagggaacgggttccacgggatcaggttgatcttacacggcgtatctttcagtagctccgccagttggtgcgcgtgttcagtgccgtcgttaacgtggtcaagcatcacgtattcaatagtgactcggccctgattggcgttggatttccccagataacggcgcaccgcagcaaggaacgtttcgatattgtactttttgttgatcggcacaatttcgtcacgaatttcgtcgttcggcgcgtgcagggagatagccagcgcaacgtcgatcatatcgcccagtttatccagcgccggaaccacaccggaagtggaaagcgtgacgcgacgttttgacaggccaaaaccgaaatcatcaagcatgatttccatcgccggaacgacgttgttcaggttgagcagcggctcgcccatacccatcatcacgacgttagtgattgggcgctgaccggtgacttttgctgcgccgacaattttcgccgcacgccacacctggccgataatttccgatacccgcaggttgcggttaaagccctgctgggcggtggaacagaatttacactccagcgcacaccccacctgcgaagagacgcagagcgtggcacggtcgtcttccgggatatacaccgtttcaacgcgctgatcgccaacggcaattgcccatttaatggtgccgtcagatgaacgctgttcttcaaccacttccggtgcgcggatttccgccacctctttcagcttgccgcgcaacactttgttgatgtcggtcatctcatcaaagttgtcgcagcaatagtgatacatccacttcatcacctgatcggcgcggaagggtttttcacctaaatctttaaaaaactcccgcatctgctgacggttgagatccagcaggttgatttttccatctttcgtggtgacgttttcaggtgtgactaattgttcagacatatgctattccggcctcgttattacacgttatggcccctggagggttgaaaaaagaaacgccccggtgagcggctgctcgtccgggggcgctgcattgtacaaattctggcgcacggatgccacgtttgcacgcggcatttacgaaattattaacgggtgcgcgggcacacttcgccttcgccgaagaaataagcgatttcgcgagcggcagactcgacggaatcagaaccgtgggtaccattttcggtcaggctgtcagcgtaatcagcacgcagagtaccggccagtgcgtttgccggattggtcgcgcccagcagatcgcggtgacgctgaacagcattttcaccttccagcacggaaacaacgatcgggccagaagtcatgaattcaaccagaccatcaaagaacggttttccatcgtgttcagcataaaagccacgagcctgttcaacggtcaggtgcagcattttggtgccgacaattttgaaccctgcagcttcaaagcgcgcaaagatactaccaatcacgttttttgctaccgcgttcggtttgatgatggaaaaagtacgttcaatagccatttttacctctgtaaattgttctgttgttgtctgtaccagcgtacgagatggcgcggattataatgagcaacagagccgttgactattgatgaaggtaacatttttttaaaataaacccagtttaagcaacaatcagggacaaaatagactattgcatgacaaatttcactgtcgctatttgccccacgtcatccatcaccagcaattgataatcgcctttatccgtcaaatgcagggtcacgttgcgcccacgttcagttaacggttcgccgttcagaaaccaccagcgttcacctgctcctccacttgattgcaacggcaaagtcgctgccgctgcgcccggtaaacgtttaataatcgcgccatcgcgcacacctgttagctgcagcgggagttgtgcatcgtgaccgtatggcgggcaaattgtcgaggccggtggcaagcgcacagcgcgacgttctgatgcgggcagccagggttccagcggtagcggccagacatttatcatttcttgtcgcgcctgagggcaatcagcggcaacacgtttgccgttttcatccagccagatggggaaacgaatgccattaatgccttcctgctccggcagtaatagagttggcggctggctcccgtccagcagccaggttgccaggcggcggcgacagttaccgtcaccttccggcaaagactgtccgcccggccagcagataacgccacgacttacagagtcaggacgtgggtcttccggcaaattcacactgcgcgacagtaagatattattaacctgattcaacagcggtacggcactggcaaagccaaactgaccaacaacgggcgtgccgtccggtctgccagtccagatcccaatgacatagcgagcgttaaccccaatcgcccaggcatcacgatagccatagctggtgcccgttttccatgccagtggggcgacgcgcggcaaggcaccatccggcaagggttgcgcttcatcagccataatccggcgaatgatccacgcagcccccgacgacattaaaggccgttcaagcagcggatcgtcaggctgtaagcgcaatttacctgccttgccgtggcgagcaaacgcggtatacgctgccgccatatcttccagttttgcgccagcgccgccgagaatgagcgaaagattcggtgcagcaccgttgggcaaatataacggcaatccaacattgcgtaactttgccgcaaaccgtttcggtccataggcttccagcacctgcacagcaggtaagttcagcgatcgcaccagcgcctcactcatgctgatcgggccatgaaaaccgctgtcaaagttgccaggtcggtaatcaccggtgcgtctggggacgtcttgcaacagcgatgccgggtggatcaagccttcatccagcgccagaccataaacaaacggtttgagcaccgatcctggcgatcggatcgcattgaccatatcaacatgaccaaagcgtgaatcatcgttgagatcaaccgatcccacccagccgcgaacacgcatatcggtatgatcaaccacgatcatcgccagtgagctgcgcggtggcaatcgtcctttccagttttgcgccagttcttccagacgtcgttgaagaccggcatccagcgtagtaacgattttgtcgcttttgcttttaccgagcatcatgcgcgaaaacagcggtgccagttgcggcatttgtcggggtgccagccagatgggttcttcccttgactcttttacccgctcacgggaccacacaccttgcacggccatccgttcgagcactttattacgcgcggcttcggcacgctccggccaacgatccgggcgaagacggctgggcgcttgcggcaacaccgccagcattgccgcctcggaatagcttaaattcgcaggcgatttcccgaggtaagcccaacttgccgcaccaatcccctgcaacgtaccgccaaacggggcacggttaagatacaaggtcagaatttcacgtttagacagatgccattccagttgcaacgcgcgccagagctggcgaattttgccgccaaacgttttggggtgaggatcaagcaggcgcgccacctgcatggtgagcgtgctgccgccggaaatgacccgacccgacgtgagatcttgccaggctgcacgcgccaccgagaacggattcacccccggatgcttccagaaccagcgatcttcataattgatcagcgcttcaaggtaacgtggagaaacatcttcgattgttactggataacgccagatgccgtcagcatcggcgaaacgccagagtggcgtaccatcctgcgccaccaccacgcgtgcaggattcacttcttgcaatggcagaggccagagtttatctgctgcccatgctgccagaatgatgataaaaggcgcggctgccagcattatccagcagccgcgtttggttaacaggcgaggcatttacggtctgactatcaacagatcgtcagccgcaccagtcgcccgccattgaggaacatacattgattccaccataggctgcggcacctgatacgttcccggcgtcaccgcccgcgccagatacaccagcgttaccggttgatattcatcaacggcaaccgccgccacaaagcgatcgtcacggaactctatgtgcttaatgctcgcctgctgcatctggttcagcaagttctgcacttcaccaccactttgctccaggctggcgctgccgttcgccagattctggttttccagttccagccccgcaggcaacagatccacgactaacgcatccggtacactgttactggctttaacctgcaaccacaccagcaccagatcgccgctacgtaacgagtccagcgatttgctcttaccgtcagtacccagaatatgacgctcaatttgcagcacattgctcgccggtaaaggtgcggattgcggataaccgctggcatccacacgcagccataacggctgatcgccactgttggtcacctgcaaggtggcaagttgatcgctattcagattgctggtttgcgctttctcgcctgtcaacggctcagcagagaaagtggtttgcgcctgccatttgcccggtaaatcctgaagagtacgggcagccaggaacaacgcgttactttcctgcgtcgatagccagcgttcaccgaacgcctgctgcgaaagtgtgtttaacagggagtactgctcatcgggtagcagtttgttctcttccagcaatgagagcatcaacgcgctgtctcgcagtggactaccgtaatcacccagccatatccgctcatcactattacgcggcgttttcagcgccagcgcaatcgcttcttcaccacgcgtcgcatcacccatgattttcagcgcaacgccaagttgcagcagcggtaaaccagaagcggcatctgcacgatgctcccagatttcacgcagcgcacccagtggtgctttttgctgacgggccaacaccagcgcagcgtaagactgtacggcgaatttactggctttgagattatcagcgtacgggatcgacatcatgcccggatcttgtaaatagcgcagcagacgctcattaccccggttaatggcgtctgtcggcacgctgtaaccctgttcgcctgcgcggaccaggaaatccatcacgtaagccgtcagccagtactcttcgtcaccgtttttatcccacaacgcaaagccgccgttatcacgttgcatttgcagcaaacgggaaatgccgatatcgaccgatgcacggcgtttctcatcactgtcgcctttgatgcccaacgcctgcagttgggctgcattggtataaagtgacgggaacaggccgctggcggtttgctcgagacagccgtacggatacgcttttaactctttgatataacgtgcgatgttcagcggtggtttgccactcaacaacaattgcccttccagcgtaacaggcgagaagttttgcaatccatcagccgggagcgcccaggtttcaccaggctgtaacgccgtaccgtaattgaccgtttgtgccgggaatgctggacggacgccgattttccactgcttatgctgatcggcaacggtttccccgggtaacgctaacccgctaatggtggcctgaatgtctccatcgccataacccggcaatgcacgcaccgggataaacagcgtagtacgcacccctggcgctaattcaacaggtgcgggggaattactcaccagttcaagcaagccactggcggtcagagcaacattaagtttttgcggtttatcggtaagattagtgatatccagcgtcaggcgcgaggtatcgccactcgccataaagcgtggcatgttcagttcagcaatcaccggtgcggcaacaatcactttgctttcgttgcttccgaagtcatctgccgtccaggcttgcgccatgacgcgcaattcaccgttaaaatcgccaattggcagtgtaaccgagccttcgccctgttcattgagcgttaccggcagcgcctgctgcgcgacaatattgacgtgattgaccggcggtttaccaccacgtttcagctcatcaccatcgccaccaaaacgcagagctgccagacgcccctgaccttcaatgacctgaccgtaaatatcgtaaatgtctgcgccatagcgtttctgaccaaagaacgcctgccacggatctggcgtgacgtaatcagtaatattcagcacaccgctatcaaccgcagacaccagcacattcacctgttttggcatctcaccatttttattgctggctttaattttcacggttaatggctgattggggcgcattttggtaggggtttccagcgccagatcgaggcgacggttttcatcaccaagcggcagatgcaacaccccaaccgcgcgttttggcgtcgcggagcgagatttatcgccaggacgtaccaccagcgtacttaaatacagatcatgacgattccaggttttatcgaccggaatcgtcagatccagcccttgagccggaacatcaatctcttgccaccacagcggcccttcactggactcgaccatcgcataacctttacccgccgttggcgcggcaatatgcaacttaatggtatcgccagggcgatagctggctttatccagtttcagcgtgacacggtcgggtcgcactgcaccacccccgtcgctgttatcctgccagctataaccagcccagaaacgcacactactgaccgcttcattcggcgctttaacttccagacgataagcgccccactctaccgggaaactgaccttaccggtttcgtccgctttcagatccagagtttgttcattttcgatcagatctttttgatcaaactgtgactgccagccttcatattccgaccagttccagtagtaatcgcggcgttcgcgaatcaggcgcacctgcaagctcgacacggcttttttcacgccttgcgcatcgctataaacgatgtcaaaagcggcgttactaccttcatcaacaatgggctgtttcaccgtgctgtcggtgcgataatcgtaaaccgatttcgaggcgaactgcggacggatccctggcaatgcatcagcaggccagatagcctgctcagcacggcgcgtcaccgggcgaccgcccgattccagcaaactaccctggaaaataacctgtaatggggaatgtgtttccttccactggctttctgtagaaacttcgccgcgccctttatcatccagcgtcaactgaacttcatccagcgtgcgggaaagattttcggcagctatatcgccgaattcaaaaccaggtaaggctgacacagcttcacgcagtgggcgcaggaaaagttgcccttgcaaagtattaccattagcaggtgcgccatacaggtagtaccccaccacggagaatttcacttcatctttcggcgttagcggggttttctcaccggtcagattcagcgccatacgctctggcataaaatcttcgacgtggaaatcccacatccgatactggttatcgcccgtgttagcgcgaatatgccacataccggttgccgcattgctatcgagtggccaggtaaagtggtagaggccattctccggctgactaacgacgctcctgagtacctgcccgtcgggtttaatcacgtctaacttgatgggttgatcgggcaatgctttaccgtctgcatcacgcagcaaaccattgaggatgaccgtttcacccgggcgataaagatcgcgcgggccaaacatgaaaaactgtttgctatagcccggcgcgccagcaatgttaaattccgctaagtccagcgccgggagttttaaatcgagcagcgttgtctgaccgtttttacgcgccagcagtaatgccgcgtttttatcattttccagctgcacatgcccctgagcgtcactgcttgcctgagtcagagtctgccctttctcatttaataaagagacttcaattccttgctgggccgcgccgttttccagactttgggtaaagatatccagacgattgtgataacggtgagctgaaacgccaatatcacttaacgtaaacagcgtcgcgggattactgtaatcgtaacgtccagcctgattcatcacagccagatacacgcccgcctgctgaagcggtttgatatcgcccagcggcagcaataatttttcacgggtgttacgcgcaggattgagatcaaaccgtccggtgtagaccagatccgccatctgcagcagtttatctgactgccagttcgccagcgaattgcggtattcccactggctaatgaaagcgggcagtgattctggtttcacacggaagaagttaacatcgacattgttaacgttaagcgccattaccggcagcccttcaacgaccttaccaggaagcaacgaaccacgactggcaaaaccgacgctgggttggatatcgcgggtagttatagttttttcgtcatctttactaaaggttgcgttattgagcgctttgacctccttgccaatagtgacgatcaaatcacgtttcggttcgaggtggcgtaaacgcagctctttaagattatctgacagctcccaggcaccatccactttgccgctttttttatcgacgacatgaataacgcgtgagaaatcctgatccgggtcgagagggatggagaacgtcagcaccagcgtggctgcgccatcgagttgaacttcagagagatccagcaatgtcagcgccttaccggcactctgttgggccagtttttgtcgctccggcgcggaaagctttgctgaactcacgttttctgaagaggccgctttagtaacttcagaaggcgcatcttttttcaccgctgttggcgcgttatcgttgttgtcgcaccctgccagcgccagcattagcatgcaggaggctacgcgtaactttttcatttttcatccctgccacaatggcccgttagcaacgtcgaataattattatgcgtgagaatttacgttatgtaattcagtatcacgcccatacaatccgaattttagtgagaattgtggctcagacagccaaatcagcctcttttgcttgtcgcttttcactaaacatccgacaatttagcctaaccccggcaaaaatggagatgcctatgtccacgacatggtttgtaggagccgactggctcgccgaacatattgatgacccggaaattcagattatcgatgcccgcatggcgtcgcctggacaggaagatcgtaacgttgctcaggagtatctgaatggacatattcccggcgcagtgttttttgatatcgaagcgctttctgatcacacttccccgcttccgcacatgctgccgcgcccggaaacgttcgctgtggcgatgcgtgaattaggcgttaaccaggataagcacctgattgtctatgacgaaggtaatcttttctcagccccacgagcatggtggatgctgcgcacctttggtgtagagaaagtgtcgattctgggtggtggacttgcaggctggcagcgtgatgatctgctattagaagaaggtgcagtagagctgccggaaggagagtttaacgccgcgtttaatcctgaagccgtggtgaaagtaaccgatgtgttattggcaagccatgaaaatacggcgcaaattatcgatgcccgcccggctgcacgttttaacgcagaagttgatgaacctcgcccaggtttacgtcgcggacatattcccggtgcattgaacgttccgtggacggaactggtgcgcgaaggcgaactaaaaacgaccgatgaactggatgcgatattttttggtcgcggcgtcagctatgacaaaccgattatcgtcagctgcggctctggtgtaacagcagccgtggttttgttggcactcgcgacgctggatgtgccaaacgtgaaactgtacgacggcgcatggagtgaatggggcgcacgagcagatttaccggttgagccagagaaataagcttttaacaggcaataaaaaaccgccgaatttggcggttttttattgctggtctggttcgcggcctttccagcagattggcttgtgttgcatgagcaacgcaggtgcttcacagcaaagcaatactcgccagtaactctctttttgtcaagcgaaagagagtaatcattgtttatttagcgtattatcgacaccggccctttccgccgtctcgcaaacgggcgctggcttaaggaaaggatgttccatggccgtaaatgcaggtgtttcacagcgcttgctatcgcggcaatatcgccagtggtgctgtcgtgatgcggtcttcgcatggaccgcacaatgaagatacggtgcttttgtatcgtacttattgtttctggtgcgctgttaaccgaggtaaataataaccggagtttctccggcaacaatttactggtggttaacaaacttcagagcagcaagtaagcccgaatgccgccctttggggcggcatattttagattatccggttctgtttaaagtcacgcaaaaaaccaccccagcgacgttcatagaatggcgcaatatgttcggtaataaagtggctaattcctttttccccttttttcacctgacaaatatcgattggttcatcgccaggtaatgtatcggtcgctacacttcccgccgcctgaataatttcttcgatatcaccatcggcttcaatgccaataagtaaattaggctgtgcctcttcgctctctttaattaaacaaataaaagcacgcttcactggcttaatggttttaaataaggtggtgagtgaatcaatcatttgtactggcggctctgcgacttccgataatatcagcgattcaccgccttccagtacttcctggctactcagcgaattcccttcttcaccaatcaacaaactgatttcacgcggcataaactctttaccggttggcagtttggcattaaggaagagcgtttcgccaagggtcatctcaaacaatgtgcgaacgggcattacgacaaatgcctgttcgtcttcaaccacctgttgaagtgcttctaacgaggtaaaaaaaggaatgacgctggtgccgtcttctttttcccagtgctgtaaatcaagcgcgctatcttcaactactgcctcgccctgcgccgccgtaccaggcacccagacggtggattccagtagagtacggaaaaaggccgggcggtgcgccggttcggttgctgctttttccagcaggtcttcaagttcgttttttgtttcggacataagaaccataattcattcaacgttcggggcgtaagtgcctgatgcgctacgcttatcaggcctacaagggaaccgcaatatattgaatttgcaatactttgtaggccggataaggcatttacgccgcatccggcatattagtttacgccgttaacagattagcaatcgtgcgcacaccaagtcccgtagcacccgcagaccactgttcaaccggcgctttacggtaagtcgccgagcagtcgatatgcagccaaccttgctgatagttctcaacaaagtgcgacaggaagcccgccgctgtgctcgcgcctgccggatacgccgcgcttccggtgttgttcagttcggcaaagttagacggcaattggttgcggtggaactccgccagcggcagacgccagaacggttcattctcctgcgcggcactcgccaacaagcgaccggcaagcgcatcgtcaaaactgaacagcgcgtgataatcattacccagcgcggttttcgccgccccggtgagggtcgccgcatcaatgatcagttccggtttctgcgcactggcatcaatcaggccatcggccagcaccagacgcccttcggcatcagtgttcatcacttcaacttttttaccgttgcgataggtgatgatatcgcccagcttgaacgcattgccgctgatcaggttatccgcacaacagaggaacagcttcacgcgcttgttcagtccgcgcgtaatggcaaatgccagcgccccggtaaccgttgccgcaccgcccatatccgacttcatcgagtccataaacgcggtctgtttgatgctgtagccgccggaatcaaaagtgatgcctttaccaaccaggcacgcgtacactggcgcttctttatcgccagttgggttgtaatccagcgccagcaataccggagaacgttctgaaccgcgcccgaccgtgtgcagccccatataaccttgctcacgcagatcttcgcctttggtgatccggtaagtcacacgatcccctgcgacgttgctgatcagatcaacagcacgctgtgccagttgcgatggccccagctcttctgccggtgcgttgatggtgtcacgcacccagtcgatgatcatcaggcggttatccagttcctgacgctgggcatcgtccagatccggccactccactttacgtatgcctttcggggctttgtaaccttgccagaatgcccagcagcgatccgcatcccagccttcaccgcttaactgaacatgcttgatgcccagaccgtcaatcttgcgcgccgcacgctggatcaaccccagatcgtctgccccgttcaaatgcagggtaatgccatcattattaatgctgtaagtcgctttttctccccaacgtgcgtcggcaggttggggagagagggtaatcttcatcgcttctgtcattttagttatccttattcgtttaacagcaaaacgggctacccccaggcagcccgttcattcactcggcttcgtccagccagaccaacaaaatcgcttcgaggattttctcgttcgatgcctgcgggtcgtcgtcgaaatcttccagagcgcaaatccactgatgcatatcggtgaatcgaaccgttttcggatcaatatcaggatacgcatcgtacagtgcttcgccaatttcgcggctatcggtccacttaagtcccatactaacctctgttaatgctcacgcgcatggttgatagtgtaacgcgggatttcgaccactaaatcttcgtcggtaacgcgcgcctggcagcttaaacggctttccggctccagtccccaggctttgtccagcatgtcgtcttcctgctctgtactttccggcagcgagtcaaaaccttcacgaacgatgcagtggcaggtggtgcaagcacaggatttttcacaggcgtgttcaatctcgataccgttacgcagcgcaacgtcgagaatggtttcaccgctattcgcttccagaacagcgccatcagggcagagatcctgatgaggcaaaataacaatctttggcatattaaacctcgtccacggaatggcctttcagcgcacgacgaaccgactggtccatgcggcgagcggcgaaatcctgggtttgtttgtctacgtttttaatcgcttgttcgatggcgtcaacatcatcgccctgcgccacttcactcaggtgagcggcagcatcgtcgatagcctgacgttctgcggcgcttaacagcgcggcatcagcagccagcgcaccgtgcagactttccagcacacgcgccgcttctactttttgttctgccagcattcgggcttttacgtcctgctcggcatagctcattgagtctttgatcatcgaggcgatttcgctatcggtcaggccataagacggtttgacctgaatagacgcctcaacgccggtggatttctccatcgccgtcacgctcaaaagaccgtcggcatcgacctggaacgtcacgcgaatatgcgcaccgccagccggtagcgccggaatacctcgcagcgcaaaacgcgccagcgagcggcagtcctgcaccagttcgcgctcaccctgcatcacatggatagacatcgccgtctgaccatctttaaaggtggtgaaatcctgggcgcgggccaccggaatcgtggtattacgcgggataactttctccaccaggccgcccatcgtttcgaggcccagcgacagcgggatcacatccagcaacagcatttcgctgtccggcttgttacccaccagaatatccgcctgaatcgccgcgccaatagcgacgactttatccgggtcgatagaagtcagcggtggacgaccgaaaaattcgcctactcgttcacgcaccagcggcacgcgagtagaaccgcccaccatcaccacttccagcacttcatcagcttctacgcccgcatctttcagcgcgcgacgacaagccagtaaggttcgttttaccagtggcgcgatcagttcattgaattgttcacggctgatttcgccctgccagcccgcaacgttaacggtcacggagtccgcatcgctcagcgcgattttggccgcaatggcagcatcgagcagttcacgctgaacgcggttatcgctacgatcaggaatgcccgcctgctcgcgaatgtaatccgccagcagatggtcgaaatcatcgccgccgagcgcggaatcaccgccggtcgccagcacttcaaacacaccgcgacttaagcgcagaatggaaatatcaaacgtcccgccgccgaggtcataaacagcgatcacgccttcctggccggaatccagcccgtaggcaatagccgcagcggtcggttcattaagtaagcgcagaacatgcagccccgccagacgcgccgcgtctttggtgccctgacgctgggcatcgtcaaagtacgctggaacggtgataacgacaccatccagctcgcctgccagggcttcagttgcccgcgccgccagtgctttgaggatgtccgcagaaacgcgcaccgggttcagcagccccgccgccgtttcaatcatcggcaggccattttcgctggcctggaattgataaggcagatgcggatagcgttgctggatatcagccagcgagcgccccatcaggcgtttaacagaactaatggtgttggcggtgtcgagcgctgcgttagtacgcgcgtcataacccaccgaatgcccttgctgttgatagtgaacaacagatggcagcaggtgacggccttcatggtcagctaacgtttcggcctgaccgctgcgcactgttgccaccagcgagttggttgtgcccaggtcaataccggccgccaggcgacgctgatgcggcgcagcactcaaaccaggttcactaatttgtaataaggccatgtttagcttccagaaattaaaaatcgagcagtttttcttcgagttgttcggcactgctccgcagtttatcgagaaaacgcagcttacgcacggtatccgccgccgcgtcccacgtctcgttgtctaactgttcaaccatcaactgatggcgggtatcaaacatctttttcacacgtttgataaagctttccagccgcgcttcatctttcgcctgttcgatctcgtccagttcttcgcgcagttccagctgttccatcaggaacgcggtgtcgcgcacagtatgctgctcgctggcgagatcaaaaccgtgcaaagaaagcaaatattccgcgcgcattaacggatgacgcagcgtttgccaggcctggttaatggtcgcggattgctgtacggcggcgagttgttccgcctggcttccgctggcgaatttatcaggatgatactgacgttgtagatcctgaaaacgcaggctcagcgcctgggtatcgagttgataacgggcaggcaagccaaagagggtgaagtaatccataacattctcagggctgcgatccgccgcgataacggcgaatcaggtaaaacaaaccccacgcgcaggcgaccacggtggggttatcggtatgcgcatcaaacgtggaagctttcgccgcaaccacactcatctttgacgttcgggttggtgaatttaaacccttcgttaaggccttctttgacgaagtccagctgcgtaccgtccagaaattgcaggcttttgccatcgaccacgactttcacgcctttgtcttcaaacacgatgtcttccggcgtcggttcgtcaacaaattccagtacataagccatacctgaacatccggaggttctcacgcccagacgcaggccaaaccctttgccgcggttagccagaaaggtatttactcgcgctgctgcactgtcgctcagtgtaatcgacataaccaaacctcaactcttattttgcttcacgtttgcttttatagtccgcaatggcggctttgatcgcgtcttctgccagaatagaacagtgaattttcaccggcggcagttcaagttcttcagcaatatcggtgtttttgatagcctgcgcttcgtcgagagacttccctttcacccattcggtgaccagggagctggaagcgatagcagaaccgcagccgtaagttttaaaacgcgcgtcttcaatgataccttcatcgttgactttaatctgcaacttcatcacgtcgccacaggccggcgcacccaccatgccgctgccgacgttctcgtcgttgttgtcaaaggaacccacgttacgcggattctcgtaatggtcgataactttttcgctgtaagccattataaattctcctgattccgataccgattaatgatgagcccattcgatgctgttcagatccacgccctgcttgtacatttcccacagcggagaaaggtcacgcagacgaccgatggatttacgaactaactcgatggtgtagtcgatctcttcttcagtagtaaaacgacctaaagagaaacggatagagctatgtgccagctcgtcgttcagccccagcgcgcgcagcacgtaggacggttcgaggcttgctgacgtacaggcggaaccggaagaaaccgcgaggtctttcagcgccataatcagcgactcaccttcaacgtagttgaagctgacgttgagaatgttcggcgcaccgtgttccaggtcaccgttcaagtaaacttcttcgatatctttgatgccgttccacagacggttacgcaggccgcgcagacgttccatctcggtcgccatctcttcttttgcgatgcgataggcttcgcccataccgacgatctggtgaacaggcagagtaccggaacgcataccgcgctcgtgaccgccgccgtgcatttgcgcttcgatgcgtacgcgcggtttacgacgcacatacagcgcaccaatacctttcgggccatagattttgtgaccggagaaagacatcaggtcaactttcaactggctcagatcgataggcagtttgcccacgctctgggttgcatcaacgtgatagataatgccacgagcacggcacatttcgccgatagctgcgatatcctgcactacgccgatttcgttatttacgtgcatgatggaaacgaggatggtgtcgtcacgcatcgctgcttccagttctttcaggtcgataatgccgttacgctgcggtgccaggtaagtgacttcaaaaccttcgcgctccagctgacggcaggtatccagtaccgctttatgttcggttttactggtgatgatgtgcttgccttttttctgataaaagttggctgcacctttgatcgccaggttgtcagattcggttgcaccagaggtaaagacgatttcacgcgggtcagcgccgaccagatcggcaatctgattacgggcgatatctaccgcttcttcagcctgccagccgaaacggtgagaacgggaggccgggttaccaaaggttccgtccatcgtcataaactgcatcattttctcggcaacacgcgggtccaccggcgtggttgcggagtagtcgagataaatcggtaatttcattgctctataaactccgtacatcactcaatgcaaggaaccaggctaccggctggatgtacgaccgtgtttacggagcgctaaacactccggcctgattctgaattctttttattaagcgcgtaacttaacgtcgatcgcgtcttgtgtgcgggtgcgtggcgcgtcgtgagtatgctgacgaccagacacatccagcacttcctggttattaaccagttcgcctaaagtaatgttgttgagaaaaccggtaaggcggtcgctcaaatcacgccacagcgcgtgggtcaggcatttatccccgccctggcagccgcctttaccctgacaacgggtggcatctacagattcgtcaacggcgctaatcacttcgccaacggcgatgctgctggcatctttgcctaacagataaccaccgcctggtccacgtacgctggaaaccagaccatttttacgcagacgggaaaacagttgttccagataagaaagggaaattccctgacgttcggaaatatcagccaacggtaccgggcccgcttcagagttgagcgcaacgtcaagcattgcggtcacggcatagcgccctttagatgtcagtctcatgtcttacttcacctcaaactcgcccctgcccggggttttttattgtaaaagtgggggtattgcatagcagggtcaagtctgacattcccgagtaaattggtcaactatttacttgactgatttagtcgggtatttaaccttcagtgccatttttttatcgtggcgtttgtacctgttgtcggatgcggtgtgaacaccttatccaacctgagattccgtgcacttacaggcctgataagacgcgttaagcatcgcatcaggcaaccactgttattcggccttgttacctttattctgctgctcaatagaagccagaatcccgcgcaggatattcaattcctggctttccgggcgtgcacgggtaaacagacggcgcaatttattcatcacctgccccggatggttttcacggataaaaccggttgccagcagcgtttgctccagatgaccataaaaacgctccagatcatcgaccagcggatacggtgtctcttcatgctcgacctgctcgccattttcctgagttgccagccaggccatacgcacttcataggcaataacctgaaccgccatcgccaggttcagcgagctgtattccgggttcgcggcaatcgcgacatgataatggcatttctgcaactcttcattggtcaagccaacacgctcacgaccaaaaaccagcgccaccggggtatttgccgcttcagcgacgcttttcagaccgcattcgcgcgggtcgagcatcggccacggcagcgtgcgggagcgagcgctggtgcccaccaccagactacaaccggctaacgcttcgtcgagcgtatcgacgatgtgagcattaccaatcacatcgctggcccctgctgccagggcaatcgcctgggagtcaggtttcactagtggattaaccagccacagattggttaatcccattgttttcatggcacgggcaacagaacccatattgccggtgtgtgacgtctccaccagcacaattcgaatattttgcagcattgtctttcttcatctaaagattattcacgcatcttatcataaaacgaagacagatgccgatctcgctgctatactctgcgccgttttcccgttctttaacatccagtgagagagaccgatgcatccgatgctgaacatcgccgtgcgcgcagcgcgcaaggcgggtaatttaattgccaaaaactatgaaaccccggacgctgtagaagcgagccagaaaggcagtaacgatttcgtgaccaacgtagataaagctgccgaagcggtgattatcgacacgattcgtaaatcttacccacagcacaccatcatcaccgaagaaagcggtgaacttgaaggtaccgatcaggatgttcaatgggttatcgatccactggatggcactaccaactttatcaaacgtctgccgcacttcgcggtatctatcgccgttcgtatcaaaggccgcaccgaagttgctgtggtatacgatcctatgcgtaacgaactgttcaccgccactcgcggtcagggcgcacagctgaacggctaccgtctgcgcggcagcaccgctcgcgatctcgacggtactattctggcgaccggcttcccgttcaaagcaaaacagtacgccactacctacatcaacatcgtcggcaaactgttcaacgaatgtgcagacttccgtcgtaccggttctgcggcgctggatctggcttacgtcgctgcgggtcgcgttgacggtttctttgaaatcggtctgcgcccgtgggatttcgcggcaggcgagctgctggttcgtgaagcgggcggcatcgtcagcgacttcaccggtggtcataactatatgctgaccggtaacatcgttgctggtaacccgcgcgttgttaaagccatgctggcgaacatgcgtgacgagttaagcgacgctctgaagcgttaatgactcaggcgggtgatatcactcacccgccctcgcctttcaggcgctattccgaaatacttcctcaccgctttactttctttcgtcactctcccaccatctttccccgattaatggatgataaagaagtcgcaaggaaagattatggcgctgccagtgaacaaacgcgttctcaaaattctgtttattctctttgttgttgccttctgcgtttatttagtgccgcgcgtcgccatcaacttcttctattatcctgacgataaaatatacggtcccgacccctggtcggcggaatccgtcgaatttacggctaaggacggtactcgtctgcaaggctggtttattccttcttcgacgggccctgctgacaacgccatcgcaaccatcattcatgctcacggcaatgccggaaatatgtccgcccactggccgctggtcagttggttacccgagcgtaatttcaacgtttttatgtttgattatcgcgggtttggtaaatcaaaaggcacgctgtcccaagccggattgctggacgatacgcaaagtgccatcaatgtggtgcgccatcgcagtgatgtaaacccacaacggctggtgctgttcgggcagagtattggcggggcgaatattctggatgttattggtcagggtgatcgtgaaggcatacgtgcagtgatcctcgactccacctttgcctcttatgcgaccatcgccaaccagatgctccccggcagtggctacttacttgatgagagttacagcggtgaaaattacatcgccagcgtcagcccgatcccgcttttactcattcacggtaaagctgatcacgttatcccatggcagcacagtgaaaagttgtatagcctggcaaaagaaccaaaacggttgatcctaatcccggatggcgaacacattgatgctttttccgatcgtcacggcgatgtttatcgcgaacagatggtggattttatccttagcgcattgaatccgcagaactaacccatgatcgctagcacgataatcattcacaaaaccaccttaagacatgctaatccactggtcagaacagtttaagatgagaaaaattctgtgacgcttgccaacatttctgatgattagcattcccttcgccatttccctgagcaaactttagctattcttatcaattatgcttatgggagatctacagatgatgcctacgcttgctccaccatctgtcctttcggctccccagcgccgctgccagatcttgctgacgctctttcagccggggttgaccgccaccacggcaactttcagcgagcttaatggtgtggatgatgatattgccagtcttgatatcagcgaaacaggacgggagatcctgcgctatcatcaactcacactgactactggttatgacggtagctaccgggttgaaggtacagtgcttaaccaacgtttgtgtttatttcactggctacgacgtggtttccgtctgtgtccgtcatttattaccagccatttcacccccgccctgaagagtgaactgaagcggcgcggaattgcgcgtaacttttacgacgataccaatctacaagcgttagtgaatctctgctcccgacggctgcaaaaacgctttgaaacgcgcgatattcatttcctgtgtctgtatctgcaatattgtttgttgcaacaccacgctggaattacgcctcagtttaatccgctccaacgtcgctgggcggaatcctgccttgaatttcaggtagcgcaggaaattggacgccactggcagcgtcgggcgctccagcctgtaccgcctgatgagccactgtttatggcattacttttttccatgttgcgggttcccgatccactgcgggatgcgcatcagcgggacaggcaactgcgtaagtctatcaaacgtctggtaaaccactttcgtgagctgggaaatgttcgtttttatgatgaacaggggttatgcgatcagctttatacccacctcgcccaggcgttaaatcgcagtttgtttgccatcggtattgataacaccctgccggaagagttcgcccgcctgtatccacgcctggtgcgcaccacccgcgcggcgctggctggatttgaaagtgaatacggcgtccatctttctgatgaggaaagcggtctggtcgcggtgatttttggtgcctggctaatgcaggaaaacgacctgcatgagaaacagattattctactgaccgggaatgatagcgagcgagaagcgcagattgagcagcagctacgcgaactaacgttactgccgctcaacattaaacatatgtcggtaaaggtatttttgcagacaggcgctccgcgcggcgcggcactgattattgctccttataccatgccgttaccgctcttttcaccaccgctgatctatacggacctgacgctgacaacacatcaacaggagcagatccgcaaaatgctcgaatcagcatgagggaacaactttcgggcgcaaaaacattgccggaagcgccaccagcgccaccacccagaacacgccgtggccgagatattgatacaggaaaccggcgaaaacggtcatgatggcgatactgccgcccatcgcgacggcagagtaaaccgcctgtaaacggatgacttcgctaccctggcgagcagcaatatagcgcatggcagccaggtggcagaccgtgaaggtaccgcaatgcagaatttgcaccactatcaaccacggcaacgccgtagttgctcccataatgccccagcgcactacgccgcaaatcgccgagatcaacagcatatcgcgtgcactacaacggcggaaaagtttattactcagcgcaaagataatgacttccgccaccacgcccagcgaccacaaataccccaccgccgaggccgagtagccagctgcctgccagtaaatggcgctaaaaccgtaataggccgcatgtgccccctgcaataaacaaacgcaggccagaaaacgccagttctggcgaaccaacgccaaccacgcagaccagccggtgctctcctgctggcggcttgccccttgtggctgaatcgtcggacggatgagaaagccgagcagcatggatgccacgcccaacgtcaacagcgcgaggatcacccgataatcaaacatactgaccagtttgcccgtcagcgccgagccaatgacaaacgccaccgagccccacagtctcactttgccgtaatcaagcgggaactgcttttgccacgtattcgccagtgcatcggtcaacggtaccagcggtgagaaaaagaggttaaagccaatcatcaccagcatcagccacgctacgtgcgcccccgcccagaaggcgacagcaaagagaagtgtcagcagtgccagcacgcgcaaggcggaaatcaggcgggaaggatcgctgacgcggggcgcgatgagcaaactcccgaggaaacgggcaaccagacccgcccccaataacaggccgatggtttctggcgttaaaccaatccctttaagccagacgctccagaaaggtagaaaaatgccgtaactaaaaaagtatgtgaaatagccgagcgccaaccagcgcgtggattgcaaaaccatgagtccctcccgtcaggaggcgttagtctgaggttaatcgaatgttggtgcaagttgaaaaataagaatattcgagcctgcttcctgacggttatcctgcatatcaggaaatgacaaaaaagagcggcccacaacacaacatgtaaaaaagaacgatgaaacaggtgaaaatcgcaatttattgaactgacaaactcatgtgagacggataaggcgtgcatgtcgcatccggcaggaaacaataagcacattgtcagccatctgcgttatgccgttataccagaaacgaatatctcaacgcctgggcgtggcgaggtaccagagtgtgtattacgtttaaatcacatcatcttgcaaagggattggttatgaactcactacgttattttgattttggcactgcccgccccgttttattattaattgcccgtatcgccgtggtcttaattttcattatttttggttttcccaaaatgatgggctttggcggtacggtccaatatatggcctcgctgggcgcgccaatgccgatgctggcagcgattattgcggtagttatggaagtgcccgccgcgatattaatcgtgcttggctttttcacccgtccgctggcggtgctgtttattttctacacgctgggtacggcggtgattggccaccattactgggatatgaccggcgatgcggttgggccaaatatgattaatttctggaagaatgtcagtatcgctggcgcattcctgctgttggcaattaccgggccgggggcgatttctctcgatcggcgttaggaaagatgccggatgcggcgtaaacgccttatccggcctaccgctccaacaccgattgtaggcctgataagacgcagcaagcgtcgcatcaggcatcgtgcaccgagtgctacaaaatcgaaattaccccgtaggcctgtgcatccggcattttataaattacagcaacgcaacccgcaacgacatctctgaaattgttgattcccctggtgcaagcgcaatgaggtcaccaccttccggacgatgatggtcatccggcgcatgactcatcggttccagacagaagaaatcaaacgcatatcctttatcaaacgcagggtctgaaacaaagatgaaataacacggtgcaggtggcgtcgtttccatgatgatggcataaccctcctgcggctgctcgatgcgggcctgaccattccatccggcaaaaccattgtttacccactggtgcggcaacggcgtgagctggttaaaatccagttcctgcggtagctgctcgcaaaactcacccgccagccactgctctcgctccagccagtaaccgctcgcctgtgcctgaacccgcgtttgcggcgacaacggaaaataaggatgccagccggtaccaaatggcagcgtctctgccccttgattggtgacagcgagcgtcaccgtcagcgtatccgccgttaaatgaaatgcctggcttacccgatagtgataaacaccgctgagatgttcatacaccagacacaagctatcatcgctgcgcgagacacattgccactcgcccaaccagccatcgccgtgtagatagtgcgcatcccactcaacattcggttgcagttgatactcacgcccctgccagacaaaacggttgccgctcacccggtttgcaaatggtaccagcggaaaacaagaggcatcggttgccacaccgctttttttaccaggacgtagcagcggcgtcgtatcgcgccagaagccttcgattacgccgccctgatcagaaacgtccagctttagcagcccgtgagatagggtatagatggtcatccgcagactccttaatccgggaaattaatcacaactttcccgcatttgccgcttgccatcagtgcataagcatctcccgcctgttccagcgagaagcggtgggtaatggcgttacgcggccacagtttccagtccgttaaatcgtgggcgcatttttccatatggaacagactggtcacccaggagccgataatccgccgttgatggtgcatcaggtcggcgctaacctcgaactcgacttttccggtttcaccaatgtaaaccacgcgtccccagtcagcggtggattgcagtgccagtaagcgacctgcggcattaccggaacaatcaagcgcaacatccgcgccgccgtgagtgagttcggcgattatctgcggcataccttcggtggtcgctaaatagccgtgatccatcactcctaactgtttcgccatcgccagacgttccggcaacatatcaacgccgatgatccgttttgcaccgcgacctttcgccagcatcatcgccatcatgccgaccggccccagaccaaccaccaccacgttatcgctaccggaaacctcgccgcgcaaaatcccttcatacgccgtaccaacaccgcaactgataaacgcgccatcttcgtaactcagcgcgtctggcaggaggatcagatctttttcttccgccagtaggtattcggcatgaccgccgtcacgctgccagccgtaagccgcttttccttcgccagtacaagaaataggaaaaccgcgacggcagttcgggcaaaaaccacagccagaaatgtgatacaccagcacgcggtcgccctctttaaaatggcgacagccttgccccatcgccacaatctgcccgcacggttcatgaccgttgataaatccctggtataacggtttatcgggtgccgccgccgtagcgcggtgctggtggtagatatagtggacatcgcttccgcaaatcccggaggatttcattttgatcagtacctggttaatccccggcgtcggcaccgcaacttcccgcagatcgacggtcgaatttcctggtaaataagctgccagcatcgttttcataaatccctcattaacaatacgattaattttcatccctgccgcacccgcgccaggggcgttaaggtttagcgtttcgctttactgctacgctgggtcagcaagatattcgccagcaccgccaccacgatgatgacgccgcgcaccacctgctggaaaaaggagttaatcccgagcagcaccagaccgttaccgattagcgtaatcaccagtacgccaagcagcgtaccgaacaacgagccgcgaccgccggaaagcgccgtaccgccgaccacgaccgcggcgatgacgtcaaactccagaccgtttgcggcacctgcgttaccggaaccgaggcgggccgccaacaaaatgccggtcaccgccgctaataatcccgaaagggtaaaaataagaatgcgtacccgacgaacgttaataccgcacaactgcgctgcagtggcattaccgccaacagcaaaaaccgagcgcccgaaggcagttttgcggctaatgaacacaaacagcgcaaataacaccatcatgatcagcgcggataccggcacaccgagaaattgtccgcccagccaatccagcacttcgttttcgttaattggcactggcaaggcgttcgtcataaacagccccattccgcgcagggcgctccataaacccagcgtggcaacaaaacttggcacgctaaacacgccgcgcagcaccccggcgagcgttcccatcagcgcacctaacagcaacaccagcagacaagcaatcgccagcggaacgtcaaattgcagcaaaaacgccaggcacactgaaacaaaagccaccatcggcccaacgctgacatcaatttcaccggagataataatcagcgtcatcgcccaggcggcgatcccaatggtggcggcatcgcgcagcacgttcatctggttattcaatgagataaagccaggcgcattcagggagaagaccagataaagaatggcaatcaccaccagcaaaccgatctcattaatatggcgactgacaaattgtttgagcgagacgctcttgccctgcggcaatggtaatgacgaagcagacatcttcaggttcctcggtaaaattcatcagtgcacagacagaatggcggacatcagctcatccacattgaccggagagtgaaactcctgcgagaacgtgccgtgctgtaataacaggatgcggtcacacaccagcggcaactcctccacttcactggagataaacaccacgctttttccttcggcagccagctcgcggacaatacggtaaatctgctgtttggcttcgatatcgacgccgcgcgttggctcgtcgagtaacaaaatctggctggcggcatagacccaacgaccgatcaccactttttgctgattgccgccagaaagcgtgccgatgggcgtttcgctactggcggccttgaccgtcatccgctgcatcacctcttcggtcaggcggcggatggtggaccattgcagtacaccgttggcgctgattttttgccgattggtcagcactgtattttcgtcaacgcccaaccagggaatgatccccgcttctttgcggttttctggcgtatagccaatgccgcgtttcagcatgtcgccgtaatcggggcgcgtgattttctcgccgttgataacaatttcgccctgttcatacgtctccagcccaacaatcgccttcagcaattcactgcgccctgcccccagcagaccagcaatgccgagcacttcgccacgacgtagtgtaaaactgatatcctccagcttgggcttatggcgtaacgcacggacttccagcacggcctgatccacaatttcctgaggggcaaccggcgcaatatcaacgtgatcgcgcccgagcattagcgacacaatatgatgcgtagaggtgtttttgagcatcacatcgcccgccacctgaccatcgcgcataacggtggcacaggaggcaatgcggcgaatttcttccatccggtggctgacataaatcaccgccacgcccagtgccgacatctttttcaccgcgctgatcaccagttcaacttccgcactggcaagcgagctggtgggttcatcaagaatgaccacgcgcggctcgcccttcatcacccgcgcaatttccaccagttgcttttgcgccgggcttagtgttgaaacaagttgttcaggactaacgtcaacgcccaacgcctgcaagcaacgttgggcgtcctgcgccatttgcaggtaatcaatcatgccgttgcggcggggccactgaccgaggcagaggttttccgccactgtcagcccttccaccagacttaactcctgataaaccgcacgaacccccagttcagcggcacggcgagtcagcgtagcttcgtcaccttccagtcgcgtctcgccaatccagatatcaccgctatccggacgttcgctaccggtaagcattcgaatgagggtcgattttcccgcaccgtttttgcctaacagcgcgcgaacttcgcctttattgagcgtgaagttaacgttatccagcgcaacgacgccggggtaacgcttatttcctgccaccacttttgctaccgggactgcctctgttgccgtgaacatagggacctctgcgaatcagcgattagggcagaccatcaacgtgcgttgccagccactgtttaccgtcttccgttttggtatagagatcgattggcacctgaatcactttttcaccgtcggcttgtttattgataaccttcaatgtttgcgtaaaaacagcattgcccattttcttaccggaaatatccaccaccgctttcagcacctggttgttttccagctcctgagcaatttcagtggtcatatcagaaccgaaaacagcaatttttccggcctgattttgattacgtaccgcttttaccgcgccgagtgtcgctccgcccgattcccccataatggcgttgagatccggcgtggagataatcagtttttcaccgacagaaatcgctttatctaaaacagtcccttcctgattagcgacaatttgcgcgccgggaacgcgggcttttaatacttcttcaaaccctttacgtcgttgcacacaaacttcaaaggcttcgcaattgatgacggcaattttcggctggtcaattttgttggcaataaaataatcggcggcagcgttacccagttttttaccaaattccagcgggtcaccaaccagatatgccgagacatatttatcgacacccttttgattaatacaggtgttgtagcaaatcactggaatgcccgcctcactggcgcgacgaacggtgcggctgctgccattttcagaaacagctgacaaaataatggcatcgacattacgcgccacgagggtatcaacaaaggtactttctttcgaaatatcaccctgggcgttagtttcaattaactgtacctgtactgaagaatcttttgccgcatcctgaacgccctgacgcactccggcgtaatatccctgggtatcaaggtatattgcgccaatagtcatttctttatcagaagccctggcaaatagtgcgctacccaatagcgtagccattaataataaattacgggttcttgtcatttttttaggcatagtgcctcctgtagggtttttatttacaacggcttattttaattatttgagcgtgagcggcagcgcgtgccgctcaaatattacagttaatagggtttagtgaacgtagctaaaaataaaaggcgtcacggtggtgaataatgccgctttcggccaggctggattaatcgccatcaattcagcgcgagcagattcatagtgcgcaacctcccctaatcccgcggccgccagcatcgccaccatcaggcatttttctttatgctgctgttgtaaatcgccatacagcgacaacaagtcaggctgcgagacggcaaagaaatccgcttcgatactggttttcgccatctcttgtgcccactgtttcatttcactaaacagttgctgtgcggtgtgttgttcgcccagcagtcgcagcgccattccttgccagaagagataatcaaccggctgatcgttgtaataactgtggatgttaatggtgcgatcgccggtcgccgccagacgtaaacaacgcgtcgcttcagtttcatcgccctgcgcgttggcgcatactgcctgccagaaccagatgtcgttgtcagtttgccccggtaaacggccttcgcttaaattctccggataatgcagcgcggcatgaagcagttcgctggcctgctgcggctctctggcatcaagatgctgccaggcgcgtaataactggttgaggataaactggctggtgaccttcccttccccaccttcccacgggtggaatttgcgcgtggcgagaatgtccgccgctttgtctgcctgaccagtgagatgccacaaattgagcagttctgcggtcatgtcgtcgcgtttcagcgcaatttccagattattttccagacgcgccagtcgtttctccggtgtgacaccgcttaacttatccagcaaatcccgttcgaaaagcagacgtgcatcctgcggcgcaagctgataagcattatcaagataacgcgcggccagctcataatcgtgctgcttattccacgcatggatcgccaacccgcgccagccgtcggcaaactccggcgacatctctacgcaacgctgccataaggcaatggctttgccgtagctacgcttgttgtagtagaagcaggccagtaaatgccgggcaaaccagcactcttcgatactctccagcgccgccacttcttccagcgtattcgggaaacggacaaactgcgggaaggcatcaatagcttttacgaccagttctccgcgttcagcttttggtagcaaactggcttgcaggtaaagcggtagcgtgcgctgacagtccagtgcgttcagcatctctgccgccagggcgggcatgccccagttaatcagttgcccggcggtcatcagggcgttaacgtcgcgtccctgacaaagacctcgccactgcgcgagggctgattcgctacgaccatcgaaccagttcagccaccacagagtggcgttcagcggataatcacgcagcagtttctcgcgctgcaaacgcgcgttgtcctgacgaccacttaacaccagtagcaggttatgcaggcaaagcacttcctgattggttgggcaggcgcgaagactttgttggcaaaaatccagaccagtgtcgaagttaccattacgcgccgccagtcgtgccagaccataatagccaccggctttactgttgccgctccagaccgcacgccagaaatcctcttcggcttgttgatattgcccctgacgttcgtaagcactggcgcgaatcaaactcgcctgtccgcactgcggatttttgttcagcgcatgtgcgcgtttcagtgcctgactggcatataccaccgcttgcgggaaatctgcacggttatattccagcattgccagcgccagattacagcgataatccagcggatccagcgccacgccgcgcaggtagtaatcgaacggtgaacggctcgcgtgatgatattgctccagatgttgaccgataaaccaggtttcatctgtactggtaatgtcttgtgctgccagtggcgctttggcgacgtccggcaacggcaacacttgcggctgatgttcctgataactcagtatgatattgccgtcggcatcggagagctcaatggtcagcctttcaggattgataccgtgcaacacgccctggatggcggtcgctggcatcagtgccacggcatcatcaagtaacgcgttgcatttgccgatttcgcggatcgccaggcggtatccgttcaacggagagatggcatacaacccccactcaatcccccgatcactacgctggagttttatcaccgcatcgcgggaggcgttttgcaccatgcccaaagaatggtaaggcaggaaatactgctcaaaacgcttctcttcataagcatcaagccaggtaaaatcgggctgattatccgcaaaaatgccggtcatcagttcgatatacgggccgttattgtcggtcagactcttatcccacgcctggccaaattcactgtgtccccagctccactgttttttacctggcgcgatatggtggttggcaacgtgtagcaaaccgccatcttcatcgtgacaccacgcgccaacaaaatcgtactgtgatttttcagccatatatgaggttggaacgggcacatttttatagcgagaaatgtccactccggcggagtagtccactttgtagtaagtgccggtggcgatggggaaagcagagacggcccgtttgccgtgatcaaacaccgccgttacatccggcgggaagacgctctgatgcccttcaccccctttcactgccgggttggcccaccacaagaaatgacgcggcgtggcgttgccgttatagacgcggctggcaatttccagtgccgcccggtcagggcgcagggtgaaacctgtcatcacctgtaaaccgtgcatcggctccgtttcgccgacccacacggtttgtgcgccgtcttcatgggcttcgagggtgaaatcgacgggcataaaggtggtcgggcgatggtgttgcggccagttaaactcaatcccgccggagatccacggccccagcagccccaccagcgccggtttaatgacttcattgtgatagacaaaatcgcgctgtttcactttatcccatgcgcgatgcacccgaccgcccagttccggcaggatcatcactttgatgtagtcgttttccagccacaccgactgccaggatttcagggttttctgctcgctcagcgtatcggtcacgccgtagggataaaccgcgccggacgatccctgataaacgcgattttccaggaacatgggatgtatatcctgcggcccggtttcataggtcgggatctcaacgcgctcttgccacacttttactggagtcatggtgccctcaatattaacaagacatactgaattaaaagatttgtggcagtgtattgaacaatctggcaatgttttcgcggaataatcacgcaattaactaaacaaggtttagtgaagatgagagcctgcattaataatcaacagattcgccaccataacaaatgcgtgattctggaactgctgtaccggcaaaagcgcgccaataaatcaacgctggcccggctggcgcaaatttcgattccggcggtcagtaatattttgcaggaactggaaagcgaaaaacgggtggtgaatatcgacgatgaaagccagacgcgcgggcatagtagcggtacatggctgattgcgccggaaggtgactggacgctgtgcctgaacgtgacgcccaccagtattgagtgtcaggtcgctaacgcctgtttaagtccgaaaggtgaatttgagtatttacagattgatgcaccgacgccgcaggcgctgctgtccgaaatcgaaaaatgctggcatcgccaccgtaaattgtggccggaccgcaccatcaatctggcgctggcaatccacggtcaggttgatccggtgactggtgtgtcgcaaaccatgccgcaagcgccgtgggcaacaccggttgaggtgaagtacctgctggaagagaagctgggcattcgggtaatggtcgataatgactgcgtgatgctagcgctggcggagaaatggcaaaataattcgcaagtgcgtgatttctgcgtaatcaacgttgattacggcattggctcgtcgttcgtgattaacgagcaaatttatcgcggcagtttgtatggcagtggacagattggtcacaccatcgttaatccggatggcgtcgtctgcgactgcgggcgttatggctgcctggaaaccgtcgcctcgttaagcgcattaaaaaaacaggcgcgggtatggctaaaatcacaaccggttaatactcagcttgatcctgaaaaattgactaccgcgcagttaatcgctgcctggcagagtggagaaccgtggatcaccagttgggttgaccacagtgccaacgccattggtttgagtctgtataacttcctcaacatcctcaatattaatcagatttggttgtacggtcgcagttgtgcctttggtgagaactggcttaataccattattcgccagacgggatttaacccgttcgaccgcgacgaaggaccgagcgtgaaagcgacacagattggctttgggcaattaagccgcgcacaacaggtactgggaattggctatttgtatgttgaggcgcagttacggcagatttgatggcgcgataacgtagaaaggcttcccgaaggaagccttttttcaacagattaaccgtttcgcttatgcgtaaaccgggtaacgtgcgcagatgtcgagaactttacctttgatgcgctcgataacggcttcatcattgatgctgtccagcacgtcacacatccagccagccagttctttcgcttcggcttctttaaagccacgacgggtaatcgccggagtacctacacgaataccggaagtcacaaacgggctcttcggatcgttcggtacgctgtttttgttcacggtgatgttagcacggcccagagcggcgtctgcttctttaccggtcaggtttttatcaaccagatcaaccaggaacaggtggttatcagtaccaccagaaaccactttgtagccgcgttcgaggaacacttctaccatcgctttggcgtttttcgcgacctgctgctggtaagttttgaactcaggttccattgcttctttcagagcaaccgctttaccggcgattacgtgcatcaacggaccgccctgaccaccagggaaaacggcagagttcagttttttgtacagctcttcgctaccacctttcgccaggatcaggccgccgcgcggacccgccagggttttgtgagtggtggtagtaacaacatgagcatgaggaaccgggttcgggtagacgccagcagcaaccaggcccgcaacgtgcgccatatcaacgaacaggtaagcaccgatgctgtcagcgatttcacgcattttcgcccagtcaaccacgccggaatatgcagagaagccaccgataatcattttcggtttgtgttctttggcttgtttttccagatcggcgtagtcgatatgaccggtagcatcgataccgtaaggaacgatgttgtacagtttaccggagaagttaaccggagaaccgtgagtcaggtgaccgccatgcgccagattcatacccagaacggtatcgcctggttccagcaacgcggtgtagaccgcaaagttagcctgggagccggagtgcggctggacgttagcgtagtcagcgccgaacagttctttcgcacgatcgatcgccagttgttcaacgatatcaacatactcgcaaccgccgtagtagcgtttgcccggataaccttcagcatatttgttggtcagctgagaaccctgcgcctgcattacgcgcgggctggtgtagttttcggaggcgatcagttcgatgtgctcttcctgacgtactttttcctgctccatagcctgccacagttcggcatcataatcggcaatgttcatttcacgctttaacatccgcatctcctgactcagctaacaataaaatttttggcctttataggcggtcctgttggacaacggcgaacagtataaccgaatcattgtgcgataacaggtcttgacaaaggaatttacgcaaacgattaccttcaggctacgcaaggctttggagaataaagagcttgcaaccggaaacggatttcttttcaggtttgtgatgcaaatttttcacttcatcacattctttctgaaaaacaccaaagaaccatttacattgcagggctattttttataagatgcatttgagatacatcaattaagatgcaaaaaaaaggaagaccatatgcttgacgctcaaaccatcgctacagtaaaagccaccatccctttactggtggaaacgggaccaaagttaaccgcccatttctacgaccgtatgtttactcataacccagaactcaaagaaatttttaacatgagtaaccagcgtaatggcgatcaacgtgaagccctgtttaacgctattgccgcctacgccagcaatattgaaaacctgcctgcgctgctgccagcggtagaaaaaatcgcgcagaagcacaccagtttccagatcaaaccggaacagtacaacatcgtcggtgaacacctgttggcaacgctggacgaaatgttcagcccggggcaggaagtgctggacgcgtggggtaaagcctatggcgtcctggctaatgtatttatcaatcgcgaggcggaaatctataacgaaaacgccagcaaagccggtggttgggaaggtactcgcgatttccgcattgtggctaaaacaccacgcagcgcacttatcaccagcttcgaactggagccggtcgacggtggcgcagtggcagaataccgtccggggcaatatctcggcgtctggctgaagccggaaggtttcccgcatcaggaaattcgtcagtactctttgactcgcaaaccggatggcaaaggctatcgtattgcggtgaaacgcgaagagggtgggcaggtatccaactggctgcacaatcacgccaatgttggcgatgtcgtgaaactggtcgctccggcaggtgatttctttatggctgtcgcagatgacacaccagtgacgttaatctctgccggtgtcggtcaaacgccaatgctggcaatgctcgacacgctggcaaaagcaggccacaccgcacaagtgaactggttccatgcggcagaaaatggcgatgttcacgcctttgccgatgaagttaaggaactggggctgtcactgccgcgctttaccgcgcacacctggtatcgtcagccgaatgaagccgatcgcgctaaaggtcagtttgatagcgaaggtctgatggatttgagcaaactggaaggtgcgttcagcgatccgacaatgcagttctatctctgcggcccggttggcttcatgcagtttgccgcgaaacagttagtggatctgggcgtgaaacaggaaaacattcattacgaatgctttggcccgcataaggtgctgtgatttgatgttgccggatggaaacatccggcaacccttgacccgttttaaatcgccgcatcatcctcttcaccggtacggatacgaatgacccgtgccacgtcgaagacgaagattttaccgtcaccgattttgccggtttgcgccgtgcgaataatggtatcgacacaggtatcgacaatgtcgtccggtacgacaatctcaattttcactttcggcagaaaatccaccatatactccgcaccgcggtacagctcggtatggcctttctggcggccaaaacctttcacctcagtgaccgtcatgccggtaataccgacttcagccagtgcttcgcggacatcgtccagcttgaagggtttaataatcgcatcaatctttttcatgctattccttgaaaaggtcgcctgtcttttgatctgctaaacgtaacacataacgccaattcattccttgaaatcgtttgcatccagttcgtgtcgggaaagcagtttataaaattctgtccggttgcgccccgccattctcgccgcgtgggtgacgttgcctttggtgatttgcagcagcttacgcaaatagttgagttcaaactgattacgcgcctcaacaaaggttggcagcgccgtgttttcgccctccagcgcctgctccaccagcgcatcactaattaccggagatgatgtcagcgccacgcactgttcaatcacgttgaccaactggcgcacgttgcccggccagctcgcagtcatcaggcgtttcattgcatcggtggagaacgcgcggacaaacggtttatgtcgctctgccgcctggcgcaacaggtgatttgccagtagcggaatgtcttctgtgcgctccgccagggccggaattttcaggctgacaacgttgaggcggtaatagaggtcttcacggaattccccgcgcgtcatcgcttttggcaggtcgcggtgggtcgcagaaataatccgcacgtcgatatcaatatcgcggttactgcccagcgggcgcactttacgctcctgcaacacgcgcagcagtttgacctgcaacggtgcgggcatatcgccaatctcatcgagaaatagcgtaccgccttccgccgcctggaataaaccttcgcgattgctgacagcgccagtaaacgcgccacgtgcatgaccaaacagctccgactccagcaattgctcgggtaatgcgccacagttaatagcaataaatggcttgctgttgcgcgggctggcgttgtggatagcctgggcgaaaatctctttcccggtgccgctctggccgttaatcaaaacgctaacgtctgattgtgccaccagccgcgcctgttccagcaagcgcagcatcagcgggctgcgggtgacaatcgcctcgcgccaacgttcgtcggtggctggcgcggattgttccagcgcatcgtcaattgcctgatatagcgcatctttatcgacaggcttggtgagaaaactgaacacgccctgctgtgttgcagcaacggcatcaggaatagaaccatgcgcggtaagaataattactggcattcccggctgcactttctgaatttcagcaaatagctgcataccatccatttcatccatccgcaggtcgctgatgactaaatctactttttcgcgattcagtacccgtaatccttcaacgccactttccgccgtgaccacgctgtagccttcgctggtcaggcgcaggccaagcagtttcagcaatcccggatcatcatcgaccagtaataaatgcgcaggtttatggctcatcaggagtgacctcatcggtggatggcgcgggcttttcactctcgtgcggcgtatccggcgagaaatttccagccggtttgcgggtcgagagctggcgttcaatatcggtcaggttttccagcttgcgggtagtgagttccagttgctgttgtagaacgtgatgttgctggcgcaaagtatccagctcgctgtcgctggactgctggagtttgctgtagcgttggcgctcttccgccagttgcagttgcagcgcctgaccgtcgcgccagagttgatacagtgggcgaacctgtgccgggatctcggtacttagcgcatcaatgcgcgcgaccagctggcggcgctcatacggcgtaattttggcgtcggcgagcaaaatcccttgtttaaaggtattttgccagttgccgtcgtcatattggcgggcttgctgacgcgactgcgcaggcattaaacgatcagcacaatccatcgcccgcagccagtaaagcggattggtttcggttgatttaccttgcagcgcccagatgtcgctacattcagtagaaagatagtcagccagttgataaaccggaattttttcttctgctggcgtatcaatggctggcttattgtgactctgcacgcaacccagcaatgccagacatggcagccctgccagccacagccgtcggggcaataatcgttgaaaaatgtgtcgcatattcaccagacttaaagcctatcccagtgggcgtaattgttgcaggcagtttggacatggacagcgcggagaaaccagagcgtacatgtcgtacgtgaagatttcgagcactgcccggggccgaactgacaaataaaatagcctgatgggatgggctgttagcattatttcgtgtttttcgacgacggtaattcaatgcggaaacaaacgtcttgcccgctctcgtcgaccagatacagttccccttgcatacggcgaatacaatccctggcaatgcttaatcccagaccgctgcccttcaccgccccttttcgctggtggcttccctgaaaaaagggttcgaagatcatggcgcgttcctcttgcggaatgggcgtgcctgtattgatgacatcaatataaacccgcgcaccatgtaaactgctgcgaaggcaaatgttaccggattcagccccgtagtgcaccgcattggagtaaagattatccagtacgctcatcagcagcattggctccgccaggcaagctgttgctttgagatcaacgtcggtatgcatcattttagcccgtgcgggcaggctatgagcagaaaccactgtctccaccagcggtgctaactcaacattctccagttccaccgcactgtccgcctgtttacggttgtaatcaagcagttgttcgatcagcttttgcaaattgcggctgctgctatcaagaatgctcaccacctctttttgctctggcgtaagcggcccgacaacctgatcagccagtaattcagtgccctcgcgcatactcgccagtggcgtttttaattcatgagataaatgtcttaaaaattgatggcgttgggattccagccatgacagacgctcacttaaccaaagaatacgttgcccaaccgagcgtaactcgctcggtccactgaacgagacgctattgcccagagaacgcccttcccccagccggttgatcatgcgctcgatatttttcaccggaccgataatcatcctcgtgaaaagcagtaccatcaccagactcaccagaaatagcaccagcgattgccaaccaaaatattgcccacgttcggcgatttcacgctgaagttgctgcccacgagagaacaccactgtgcgcgtggcctgcaccatttcggtattggcactggcaaaggcttccagacgcgcggcggcagcagcatcgggaccgctgttgttacactgaagttgagccagattattcaaatcctgacgtaatgcctggtagagtttatcgtccggcagcacgcctgcgtgggcatcgagcatttcgctgtaacgcttgcgctggctttgataaaccttcgcaagcgtagggtcgtccagcacgcagtactgacgatagctgcgctccatctccagtgccgcgttggtcatcgcttcactgcgccgggcatcaataagcgtagtgcggttaaccagcgccgcctgatcgctaagtgcattcaggctttgccaggcttgccatgccagcaccaacaggggcagcagaatcagcaaaaatgccagcattaccagttgtcgtaatgagcggggaaaaacgggccagcgtttcaaggcgttactctcgtcagacgcgaatagcctgatgctaaccgaggggaagttcagatacaacaaagccgggaattacccggctttgttatggaataaggcggtgcctaactcgacgtttcgcccgatggttgatatagctacgctgatatcagaagttggacggcaggcaccttgttgtgcgtcattcgaattttatgtagcacgtcccgaaggggctgacataagtcggtgaatgagccactgcttactattatgcagtaactgtgccaataaagaaaatagtttggtaacgtactgattatacactgctttgaggggtttatggcttctccactatttgaatgtaaatcagccactgtgtcgctaaaaagagacaacttaagataaacttattagataatattaaaatcaatgagttaagtgtcaccaaaaagcgacacggcaaaccacccattgtcgtgatttaaagacacaaaaaagctcccgaagttgggagctcataatagcggttggtgcttaatgccggatgcggcgtgaatgcctcatccgggctgcaataccaatgggttgacgacttaccccaactgcttacgtgcattgcggaaaatgcgcatccatgggccatcctcgccccagttttccggatgccaggagttgctgacagtacggaaaacacgttccgggtgcggcatcataatggtgactcgaccactttcagtcgtgactgccgtaataccattcggagaaccgttcgggttagccgggtaggtttcagtgactttgccgaagttatcgacatagcgcagtgccaccagccctttgctttccagtgccgccagatgcgccgcatcacgcacttccacgcgcccttcaccgtgagagacagcaatcggcatctgcgagcccaccatcccctgcaacagcagcgacgggctttgggttacttctaccagactgaaacgcgcttcaaagcgatcggaggtgttacgcacaaaacgtggccacaactcgctacccgggatcagttcacgcagattagacatcatctggcaaccgttacatacccccagcgccagcgtttgcggacgatggaagaaggttgcaaactcatcgcgtacacggtcattgaacaggatagacttcgcccaaccttcaccagcgcccagcacatcaccgtaggaaaaaccaccgcacgctaccaggacgtggaaaccctccaggcccgtgcgtccagccagcagatcgctcatatgcacgtcgatagcatcgaagcccgcacggtggaaagctgccgccatttcaacatgggagttcacaccctgctcacgcagtacggcaactttcgggcgcgcgccagtggcaataaacggtgctgccacatcttcgttgatatcaaacgacagtttcacattcaggcccggatcggcgtcgtttgatttcgcctggtgttcctgatcggcacactccgggttgtcacgcagacgctgcatctgccaggtagtttctgcccaccagacacgcaacgtggtgcggctttcgctaaatacagtctgcccgttggcggtaatcacaaaacggtcaccggaaaccgcctgcccaacataatggacgcaatcagcaagcccatgctgtgccagtaccgcttcaacggcttcacggtcagcggctcgaacctgaatcaccgcacccagttcttcgctaaacaatgcagccaggcgatcgtcacccagagtggcgatatccgcgtcaatgccacaatgaccagcaaaggccatttccgccagcgttaccagcaggccgccatcagagcggtcgtgatacgccagcagcttacgctgtgcaaccagcgcctgaatcgcgtcatagaagcctttcagttgggcaacatcgcgtacatctgccggtttgtcgccaagctgacgataaacctgcgccagtgccgttgcgcccagcgcgttattgcctttgcccaaatcaatcagcaacagtgcgttatcttcggtagaaagctgcggcgtaatggtgtgacgtacatcttccacgcgggcaaatgcggaaatcaccagcgacaacggcgacgtcatttcgcgctcttcgttaccttcctgccagcgggttttcatcgacatagagtctttacccaccggtatcgtcaggcccagcgccggacaaagttcttcgcccacagctttaacggcttcatacaggcccgcatcttcaccagggtggcctgccgccgccatccagttggcggaaagtttaatgcgtttgatatcgccaatttgtgttgcggcgatgttggttagcgcttcaccgactgccagacgggcagaagcggcgaaatccagcagcgcaactggcgcacgttcgccaattgccatcgcttcgccatagtagctgtcgaggctggcggtagtgactgcgcagttagcgaccggcacctgccacggccccaccatctgatcgcgcgccaccatgccggttacgctgcggtcaccgatggtcaccaggaaagttttctccgccacggtcggcagatgcagcacgcgtttcaccgcgtcagcgatggtgatcccttcacgggccagcgcgtcgcctttcgctttcagcgtttgtacatcgcgggtcatcttcggcgttttgccaagcagtacgtccagcggtagatcaatcggctgattatcaaaatgacgatcgtgcaaagaaagatgcagttcttcggtcgcttcaccaatcaccgcgtatggcgcgcgctcacgcttacacagttcgtcaaacagcggtaactgatcggcagcaaccgccagcacgtagcgttcctgggattcgttacaccagatttccagcgggctcatgcccggttcgtcgctcaggatatcgcgcagttcaaatttaccgccgcgcccgccgtcgctcaccagttccggcatggcgttagaaagaccgcctgcgccaacgtcgtggataaacaggattgggttggcatcaccaagctgccagcaacggtcgatcacttcctggcagcgacgctccatctccgggttgtcgcgctgtacggaagcaaagtcgaggtcggcatcagactgaccagatgccatggaagacgccgcgccgccgccaagaccgatgttcattgccgggccgccgagaacgaccagcttcgcaccaacgttgatctcgcctttttgtacgtgatcggcgcgaatgttgccgatcccacccgccagcatgatcggtttgtgataaccgcgcagctcttcgccattgtggctgttcactttttcttcataagtacggaagtagccgttcagtgccggacgaccaaattcgttgttaaacgccgcaccgcccagcgggccttcggtcatgatgtccagcgcggtaacaatgcgctcaggtttaccgaaatcttcttcccacggctgttcgaagccaggaattcgcaggttggatacggagaaaccaaccagaccagctttcggctttgcgccacgtccggtggcaccttcatcgcggatttcaccgccggaaccggtcgccgcgcccggccacggagaaatcgccgtcgggtggttgtgagtttcaactttcatcagaatatgcgccggttcctgatggaaatcgtagcggcccgtttcgtggtcagcaaagtagcggcccacttcagaaccttccattacggcggcgttatctttataagcagagagaacgtggtctggcgtggtttcgaaggtgtttttgatcatcttgaacagcgatttcggctgctgttcaccgtcgataatccagtcggcgttaaaaattttgtggcggcagtgctcagagttcgcctgagcaaacatatacagctcgatgtcgttcgggttacgacccagctttgtgaacgcatcctgcagatagtcaatttcatcttccgccagtgccaggccaagacgcaggttagcgtcaattagcgcctgacggccctgccccagcaaatctacgctggtgaccggagtcggttgatggtgtgcaaacaactgctctgcatcatctaaagcaaaaaagaccgtttccatcatgcggtcgtgcagttcagcggtaacctgctgccattgttcattggtcagcgtaccggcttctatatagtaagcaacgccgcgctcaaggcggttaacctgttgcagcccgcagttatgggcaatatcggtcgctttcgaagaccagggagagatggtgccaggacgcggggtcaccagcaggagtttgccttgcggggcgtggctggcgagtgccgggccatatttcagcaggcgttcaagttgtgcgtgctcatcatcgtttaacggcgcattgaggtcagcaaaatggacatactcggcgtaaatattgtgaaccgggagcctggcagcctgaaaacgtgccagcagtttgttgattcggaatgccgacaatgcaggcgaaccacgcagaatttccatcataagtctctcgtcttctaagctttcggtgtacccaagggggggaaacgggcgtcattataaagaatctgatgcgctgacgaaaccgtttgcgtggaaataaaatcaccatcgtgaattagcaacgcgtgccgccaatggctgtaataagttgccatctggcgcaggtttacgcaaaatgccgctcatttatgagtaaacctttcactattattacgttttttcaagctgggacgcgcacgacacagagaattaactaattgaaaaaattaaagattaattatctgttcatcggcattctggcactgctgctcgcggtcgctctctggccatccattccctggtttggtaaagccgacaaccgtatcgccgccattcaagcgcggggagagttgcgtgtgagcaccattcatacccccctgacttataacgaaatcaacgggaaaccttttggcctggattacgaactggcgaaacagtttgccgattacctcggcgtaaaactgaaagtgaccgtgcggcagaatatcagccagctgtttgacgacctcgataatggtaacgccgacctgctggcggcaggcctggtctataacagtgagcgggtaaaaaattatcagcctggccctacctattattccgtgtcacaacaactggtttataaagtcggtcagtatcgcccacgtacgctgggcaacctgacggcggagcaactcaccgttgcaccgggtcacgtggtggttaacgatctccagaccctgaaagacacaaaattcccggaattaagctggaaggtagacgacaaaaaaggctctgtggaattaatggaagatgtcatcgaaggaaaactcgattacaccattgctgattctgtcgccatcagcctgtttcagcgcgttcacccggaactcgccgtagcgctcgatatcaccgatgaacaaccggtgacctggtttagcccgttagatggcgataataccctttccgccgccctgctcgacttcttcaacgaaatgaatgaagacggtacactggcacgcattgaagagaaatacctggggcatggcgatgattttgattacgtcgatacgcgcacatttttacgcgccgtcgatgcggtactgccgcagttaaagcccctgtttgagaaatacgccgaagaaattgactggcgtttgctggccgctattgcttatcaggaatcgcactgggatgctcaggccacttcaccgacgggtgtgcgcggcatgatgatgttaaccaaaaacaccgcgcaaagcctcggcattacggatcgtaccgatgccgaacagagcatcagcggcggcgtgcgttatttgcaggatatgatgagtaaagtgccggaaagtgtgccggagaacgaacggatttggtttgccctcgccgcgtacaatatgggctatgcgcatatgctggatgcccgcgccctgacgacaaaaaccaaaggtaatcctgacagttgggctgacgtaaaacagcgtctgcctttacttagccagaaaccctattacagcaagctgacttacggctacgctcgtgggcatgaagcctacgcttatgtcgaaaatattcgtaaatatcagattagcctggtgggttatctgcaggagaaagagaagcaggctacagaagcggcgatgcaactggcgcaggattatccggcggtatcacctacggagttgggcaaagagaaatttccttttctctcgtttctttcccagtcgtcatcaaactatttgacccactctccctctctgctgttttccagaaaagggagtgaagagaaacaaaattaatctgtcgaggattgcgcttttttctgcgctttaatttcctggcggcgcatgcgaaagaagtcactgagcaacgccgcacactcatccgccagtattccttccgtaatttccacccggtgattcatacccggatgatgcagcacatccattaaagatcccgcagcgccagttttcgcgtcacgcgcaccaaagaccacgcgaccaatgcgactgtggatcattgctccggcacacattacacagggttcaagcgtgacatacaacgtggcgtcgatcagacgataattttgcatcaccagaccgccctgccgtagggccatgatttctgcatgtgcggtgggatcatgtcgaccaatcggacggttccagccttcgccaataacacgattgttatgcactaataccgcgccgaccggtacttcccgctcatcccaggcacgcttcgccagcgtcattgcatgacgcatccagtattcgtggctaaattcgacttcagacaaaaagaaaactccgattataaaagcgcggcgcattatacacggccgctatgctttactctattccagttgctggagttcaccgcgcggggttactcgccaacgatgctgacagaaataaagcagcgggttgtcctgattactgtcgctatagccactgtacagccgcagcggcgtgccgattttgcgctccagttgcgcgaccttttcatgtcccagacaacgcatcgtcaatacccaaccaccatagccacgctgaatctgactggcgataagattaacccgcggcagccagggcgtatcgaaataaaccgcttcaaccagcgactgcggagagccggtaatcaaccagatatcagcatcggaacttaacaggtaggtggttaatcgctcctgaaccagcggaaaggcggtaacattgtcacgaaaccaacgtacgaaatcggcctgcaacgcctgcaaacgcgcttcattgtgaccaaaagtgcatccccacagaagcagactcatcggccagcgtgccgcacgaccttttatcaataacgcaatggctatgatcggcaacaacggcagaacaagtaacgcattcagcggttggcgacgcagtaaataacgcaaaaaactgccgaacatatcctgctgatgcaatgttccatctaagtcaaaaaacaccacacgacgctcgtgagttgccaaaccatactcctctggactgaaacatcctgattaattttcgctactacatagcctaacagatagatcatcacttttccggcaacaatcgaccgcatcatggctaactggaatttttaattcatggcaattagcggcaatggaatataaaattcactcgcgtttgtctcatattgcctgttgtcgccactatttcatcgcgaggaaagatatgaacggcttacttcgtatccgtcagcgttaccaggggcttgcccagagtgataaaaaactggcggattatctgctgctacaacctgatacggcgcgccatttaagctctcagcaactggccaacgaagccggagtcagtcagtccagcgtcgtgaagttcgcgcaaaaactcggctataaaggttttccggcactaaagttggcgttgagtgaagcgctggcaagccagccggaatctccctccgtgcccattcataaccaaatccgcggtgatgatccgttacggctggtcggcgaaaaactgattaaagaaaatactgccgctatgtacgcaacgttaaacgttaatagtgaagagaaactgcatgaatgcgtggcaatgttgcgctctgcgcggcggataattctgaccggtattggcgcttcgggtctggtggcgcaaaactttgcctggaagctgatgaagattggcttcaatgctgccgcagtgcgcgatatgcatgcgctactcgctacagtacaggcgtcgtcccctgacgatctgttattagccatttcctacaccggtgtacgacgcgagttaaacctggcggcagatgagatgctgcgagtgggcggaaaagtgctggctattaccggctttactcccaatgccctgcaacagcgtgcttctcattgcctgtataccattgccgaagaacaagcgacaaacagtgcttcaatctctgcttgtcacgcgcagggaatgttaacggatttgctgttcattgcgctgattcagcaggatctggaactggcaccagaacgtattcgtcatagcgaagcgctggtgaaaaaactggtctgagtaaagaatgcgcgtataatgcccgcccggtttgtgttgttttgagagtttccttatggcgctgttaatcactaaaaaatgcatcaattgtgatatgtgtgaacccgaatgcccgaatgaggcgatttcgatgggtgaacatatctacgagattaacagcgataagtgtaccgaatgcgtagggcactacgagacaccaacctgccagaaggtgtgtccgatccccaatactattgtgaaagatccgcaacatgtcgagacggaagaacagttgtgggataaatttgtgctgatgcaccacgcggataaaatttaatattctgctctggaagtagagtgttaattattttataggaaaatcttaacgctattatatttatttaaatgatgacattagcataatcattcactaagttaatttatatagtatctgcccagacacttatttatagttattaaaggcgcgtccgactggttcaccggacgcaccttaagtacgtttccttgtgttataagaacaaaaggagcagctgtaaaacagcaatgatgattttgatgacccgtttaatcaggtatcggcaatcagtcattcgtttttccttaaacaaggaatgcagccgttcagattagcccttacatctccccaaaactgaacgtgcgagttattggaatcgagtgctgcactccacaccagagctttgacgacaccactcgtttcaatgggggaattcagtggcatggtgtaaagcacagcaaaattgccaataacgaaaccgattttaatgtacttatcaaaaagcggtcacgttaatcttttcatcaatgtcgatttcttcgtaaaggctcgcgttttttatgtcagagattgcaagttgcttgtacaggtcaacgaaattgatccataatcattttcgttggaatcgtgtgctgcacaaaattaaagttaaaaagtaaaacccccgttccttaccagttcgggggttttactttataaagagaacggtattattttaactttcaataattaccgtggcacaagcatagtggcgctcatcggcaagcgttacatgcatatttacaacgccgagcttttccgccagttttaatgcctcaccccatagccgtagccgtggtttgccgagctcatcattgaatacttcaaactgattaaacgccagaccattgcggatccctgtgccaaatgcttttgccgccgcttctttcacagcaaaacgcttcgccagaaaacgcactggctggtggtgcgttttccagatttcccattcgttatcgcttaatacgcggcgtgccaggcgctcaccggatcgggcgatcaccgcttctatgcgagcgatctctacaatatccgtacctaaacctaatattgccattagccacgcgcttccagcatcagacgtttcatttctgccaccgcatctttcagtccggtcatcactgcacgaccaataatggcatgaccgatattcagttcatgcatctcagggatggcggcaatggctttcacgttgtgataggtcagaccgtgtccggcgttaactttcagaccgagactagtggcaaaggtcgcggctttggcgatacgcgccaactcttgcgcctgttcggcgtcagttttggcatcagcatagcaaccggtgtggatctcgataaacggtgcgccaacctctgccgcagctttgatctgatcttcatcggcgtcgataaacagagaaacctggatcccggcatctgccagacgtttgcaggcatcgcgcattttttcacgctgccctgcgacgtccaggccgccttcggttgttacttcctgacgcttttccggtaccagacagcaaaaatgtggcttcgtctcaacggcgatcgccagcatctcttcggtcaccgccatctccagattcatgcgggtatccagcgtctggcgcaggatgcacacatcgcggtcggtaatgtggcggcggtcttcacgtaaatgcacggtaatgccgtccgctcccgcctgctcagcaataaacgccgcctgcaccggatccgggtaagcagtaccgcgcgcgttacgcagcgttgcaatatggtcaatgttgacgcctaacagtaattcagccatgacaatcctcatcattcataatgtgttttcaccgttcgcttaggcataaactgccggaacagttccctgctctttaatggtttaccgccaagatacggcttaagcgccatgcgggtaaagcgtttcgcggcgcgcagtgtgtctgcgtcaggaaattcccgcgcgtttaacgcttttaactgccttccagtgaacgttttattgtcgataacgacgcttgcgataaaccctttttcttcgcgataacgatacgtcatggtgtcatctaccggctcgccgctacccgcacaatgggtaaaattgacgccatagcccagatgcccgagcagtgccagttcaaagcggcgcaacgcgggttctggcgtaccagtgaccccggcaagagactgaatgcagtgcaagtaatcgaaaaagagttcagagaagcgcgtctcgtattccagtacgcgggagagaagttcgttgatgtacagaccgctgtaaagcgtgataccgcttaatggcagcgccagcgagacagcttcagcactgcgcagcgttttgacttcgccacgcccgccaaaacgtagcaagagaggggtgaaaggctgtaatgcccctttcagagtagagcgtttagagcgtgcgcctttggcaaccagacgcacgcgacccgattcctccgtgaagacgtccagcatcaggctggtttcgctccacgggcgactatgcaggacaaatgcgcgctgccagccttccatcggagttactcttaaagatcgtcaacataaccgagactgcgcagtgcgcgttcgtcgtcggcccaaccggatttcacttttacccacagctcaaggtgaacaggcgcttcgaacatttcctgcatgtctttacgcgcttcaatcccgatggttttgatcttggcccctttgttgccaatgaccatcttcttctgcccttcacgctcaacgagaatcaaaccgttgatgtcataaccgccgcgttcgttagagacgaaacgttcgatctccacggtcacggagtacggcagttcagcgccgagaaaacgcatcagtttttcgcggataatttcagacgccataaaacgctgtgagcgatcggtgatgtaatcttccgggaagtgatgggtcgcttcaggcagatgcttacgcacgattgccgcgatagtgtcgacattcagcccggtttcggcagagatcggcacgatatcgaggaagttcatctggcttgccaggaactgtaagtgtggcagcagatcggctttttcctgcacgttgtccactttgttcaccgcgaggattaccggcgctttgccatcacgcagcttgttgagcaccatttcatcgtccggcgtccagcgggtgccttctacgacaaaaatcaccagctcaacgtcgccgatagagctgctcgccgctttgttcatcaggcggttaatggcgcgtttttcttccatatgcaggccaggggtatcaacgtagatcgcctgatacgcgccttcagtatggatccccacaatgcggtgacgagttgtttgcgccttgcgggaggtgatggagatcttctgccccagcagtttgttcaacaatgtggatttgccaacgttcggacgtccgacgatagcaataaatccgcagtaacttttatcgatgctcattccagctccagttttttcaacgcctgttcggcggcagcctgctcagccttacgacggcttgaacctgtgccaaccaccggttcactcaggccgctgacctggcagtggatagtaaattcctgatcgtgcgcttcgccacgtacctggactaccagataagttggcagcggcagatggcgaccctgcaaatattcctgcagacgcgttttcggatctttttgtttatcgcctgggctaatttcgtccagacgagtttgataccagttgaggattaatttctcgacggtttgaatatcactgtcgaggaatacgccaccaattaatgcctcgacggtgtcggcgagaattgactcacgacgaaatccaccgcttttaagttcacctggccctaaacgtaagcactcacctaactcaaattcgcgcgccagttcagccagcgtattaccacggaccagcgtggcgcgcatccggctcatatcgccttcatccacacgagggaaacggtgataaagcgcattggcgataacgtagctcagaatagagtcacctaaaaattctaaacgctcgttatgtttactgctggcactacgatgagttaatgcctgctgcaacagttcctgatgattaaaagtgtagcccagcttccgttgaagccgattaattacgatggggttcatgcgataccaataaataaatgcgtcaacaattcagcacacgaaacagacctgatatacatggctcggctaactgcttcactgcagtttcagtttaccggtatatggggaccaacgctgtttcgtgtgccgtggcaacctggaggtgccaaccttaaacttcgggggaatattctatacacaacgacgggggatgtcgttagccacgggagatttatctcataaataattcacgttgtcgccataacggcgacaacgtgaacgaagatggctattaatggataccgccaatgcgacttaagcgcacaccagtcggccattcgccttcttgcttatcgaagctcatccagatagccgttgcccgaccgaccagattcgcttcaggcacaaaaccccagtaacggctgtccgcgctgttgtcgcggttgtcgcccatcatgaagtattgtcccggcggaacaatccaggttgccagttgttgccctggctgctggtaatacatccccacctggtcctgcgcaatcggcactgtcagaatgcggtgcgtcacatcacccaatgtctctttacgctcggaaagacgaattccattttctttggtttcgtttttcggcacttcaaagaatccgctggtcgcttccccaccattacggcgtgagaaggtctgaacgaaatcgctcggttccacgttggagtaagtgaccggtagcgcgttttcacacgcctggccggaactgcatcccggttgaatcgtcagctcttttgagaccggatcataagtgactttatcgcccggcaaacccaccgcgcgcttgatgtaatcaagctttggatcttccggatatttaaagaccacgatatcgccgcgtttcggatgaccggtttcgatcagcgttttctggtagataggatctttaatgccataagcaaacttctctaccagaataaaatcaccgattaacagagtcggcatcatcgaacctgacgggatctggaacggttcataaataaacgaacgcacaatcaatacgatagccagtaccggaaaaacagaagcaccggtttccagccagccaggcttcggcgcaacctttttcagcgttgctttatccagtgagtcaccggcagccgcctgcgccgctgcctgacgttcccgccgtttaggtgcgaaaaagaatttatccacgcaccataaaatgcccgtcaccagtgtggcaatcaccagaatcagggcaaacatattcgccatgccaactcctaagggttatttgttgtctttgccgacgtgcagaatggcgaggaacgcttcctgcggcagctcgacgttaccgatctgcttcatgcgtttcttaccttctttctgcttctgcagcagctttttcttacggctgatatcgccgccataacatttagccagtacgtttttacgcagctgtttcacggtggatcgcgcaatgatgtgcgtaccaatcgctgcctgaatagcgatatcaaactgctggcgtgggattagatctttcatcttctccaccagctcgcgaccgcggttttgcgaattatcacggtgggtgatcaacgccagcgcatcaacacgttcaccgttgattaatacgtctacacgtaccatgtcggacgcctggaagcgtttgaagttgtaatccagagacgcataaccacgcgaggtagatttcaggcgatcgaagaaatcgagcaccacttccgccatcgggatctcgtacgtcagcgccacctgattaccgtggtaaaccatattggtctgcacgccgcgtttttctacgcacagcgtaataacgttgccgagatatgcctgcggcagcagcatgtgacattctgcaatcggctcgcgcagttcgtagatgttatttaccgctggcagcttggatgggctgtcgacgtagataacttctcttgacgtggtttcaacttcatacactacggtcggcgcagtggtgatcagatccagatcgtattcacgttccagacgttcctggatgatctccatgtgcagcagaccgaggaagccgcagcggaaaccaaagcccagcgcgcttgagctttccggctcatagaacagtgaggcatcgttcaggctgagtttacccagcgcgtcacggaaggcttcatagtcgtcggaacttaccgggaacagaccggcgtatacctgcggtttgactttcttaaagccaggcagcgccttttctgccggattacgcgccagcgttaaggtatcgcctactggagcgccgtggatatctttaatcgcacataccagccagcctacttcgccacatttcagttcagtgcggtcaacctgttttggcgtaaaaatacccagacggtcggcgttataggtctgcccggtactcatgactttcactttgtcgcccttacgcagggtgccgtttttaatacggataagtgaaacaacgcccaggtagttgtcgaaccaggagtcgataatgagtgcctgtaacgggccttccggatcgccttccggcggcggaatgtcgcgcaccagacgttcgagaacgtcctgcacgccaacgccggttttcgctgaacagcgcaccgcgtcagtggcgtcgatgccgacgatatcttcaatttcttccgccacgcgttcaggatcagctgccggcaggtcaatcttgttcagtaccggcaccacttcgagatccatttccatggcggtgtagcagtttgccagggtttgcgcttctacgccctgcccggcgtcgaccaccagcaatgcaccttcacatgcagccagcgaacgagaaacttcataggagaagtctacgtggcccggggtgtcgataaagttaagctgataggtttcgccgtcagacgctttgtagtccagcgtcacgctttgcgctttgatggtaatgccacgctcacgctcaagatccatggaatcgagaacctgcgcctccatttcacggtcagacaggccaccgcagatctggataatacggtcagacagcgtcgatttaccgtggtcaatgtgagctatgatcgaaaagttacgtatattcttcataaagtatgattattgtgccttaatgcccggttaaccaggcttttagaagtcgctgttctgagcttaacgtctgtattaatagaaacgccgcattctacactacaacattgaggcgaggaaatgttcataccgtatggattgtggtatctggaaacgtcctcgcatttgttatgcaaaatgcaacaaagccagtgaaatcactggctcgcgtcttccgaagatgtttcaaatcgcacaaggccaggcggcaaggccacgcttaagatgatcggttgccattctgcccgggcagcaaacttacgcgagtagccgcgcgcaatcaggaacccgccaaaaccgccgaggatcgcaccacataatgctgcgacgtcagaagcaaagagtagctgaaatagcgaagcgatgaggaataatcccaccagcggcgacatataaaccagtaatgcggagctaagcaggctgccttcggcgattcctaattctactttttgccccggcactaacggctcatcacagggtacgacaatggtatgcgtggtttgcgggccaagtttattcaacacgcggctaccgcaaccggcgcgtgaagcgcagctgctgcatgaggctttaacatcacaactgaccagcgcctgcccgttttgccaggagacgacggtagcccactctttgatcattgcgctgccccgaacttaatattctcggcaatgcgtttcgccgtttgcggcggcagttcaccgacaatggtgatttcggcgttatcacgtacgcttgtactgacggttctgcgtccggtgcgcaacatctgatcgctgctcgatggcgtagcgcggttaacgtttaccgagaagctgaataatccgtcggaatagagacgtgattcgataggcatgttgtccatcgtcggtagcggacgtcgactactggaaacttcgctaaaaccctgtggcaaccaggttggcgtccagctgaatttagctttttcacctacaggaacagaaagcaacggcggcaaatttgccttcgccagcgtctgcatactgctgctgatatcctgattgacgttaaaagcaatcacgcgaaattgttccagcgtttcaccatcgcgatcaaggagatcaacccgcatcggtaatttcgattcggtgtccatccacacaatgtagctgtagcgtgtgccatcacgggcgactacgcgaatgacttcgcaaagacgatcagcaatacgcgtgcgtcccacggagataaagtcgtagtaaggagaaaggcgtttgaaatcggtataaatgagcgatggcagagaatcaacaatgtaatcgccattaagcgtgaacggttcaaggcccggctcaaagtagctgatttcattgccgcgctgtaccacttcccggcgcgggccatccatttgcaacagctgtgcaagcggacggttatcgaggcgtgcatgtcgataacgcagagactcaacaccctgtttattgatgctgatgaatgacagctcgtaattcagtgactgactggccaggttcatctgctgtaataacgccccggacgcgggagtggccgaggcgttagcagagaataacaggctacctgtcactaatgacatggcaaaccaaagttgcttcattactgcgattgcgttcctaaagtttgaattcctggcacctgtacagcggcttgctgagtttgtgcctgctcaaactgaagctgttcagagtggagtcggcgttgcagttcgtaatcctgcaacattgcattaatgcgacgacgctgctcctgtacctgctgctgttgaccattatttgcggtcgcttcagaaggtactcccagactaaccgggctggctttacccatcatcggcagtgtattaaatactggcgtttcgggctgctgggacgtttcagattgcccattatagtgctggacgccaacgataactgcaagcgatacgcatgctgctacgcccatttgggtaagctgtgccgcccacggacgtactttctgccagaatggcattttctgccattgatgcggcgcaggctgggcttccgggatcaatgtcgccggttgacgtactggctcttcttcaatggcggccatcacacgtgaagagatatcgaaatggagcacctcgggagtatcaccccgcattgagtcacggatcaagtgatagctttcccaggttttctgcatttctgggttatgagccagttcgttaagcagctcactatccagcgtttcgccatccattaaagcggaaagttgttctttctgcatgcctaatacccttatccagtatcccgctatcgtcaacgcctgataagcggttgaactttgttatcaatagcttccctcgctcggaagatacgtgaacgcaccgtacctaccggacaatccatgatagcggctatctcttcatagctcaggccatccagctcccgcaaggttattgccatgcgtaaatcttccgggagggactcaatagttcggaaaactatctgtctcagttcttctgacaacattaagttctcagggttcgaaatttctttcaacgcgccgccactttcgaagttttcagcttcaatggcatccacatcactggaaggtggacgacgcccctgagcaaccaggtaatttttcgctgtatttacagcaatccgatacagccatgtataaaaagcgctatctccccggaacgaatccagcgcacgataggctttaataaaagcttcttgtaccacatcgggaacatcacccgacggcacatagcgggaaaccagactcgccactttatgctgatagcgcactaccagtaagttaaaggctttctgatctcccttctggacccgttcaaccaggacctggtccgttaactgctcgctcatccgaggtaaagtctccccaaaccaaatttccacgcgctatcgaaacgccactccattagctgcaatttgagcaagcaaagggttagagtgtctcgtttttgtaaagttccgtaacgcatctgtttttgtttgtcatgctgtagacggatcattatctatcattataagtctacagaatctgaacatcgcattatctgtgtagaaatgcccatttaactgcctgaagagtaacccaacggcctttttatttcaccacctaatcctccaccagccagtaacttctcgttttctcgccgccctgaggcagcgtgtttagtcactgtaacaaatattaaaatagcaggtgtttattcgcacaacatgatgttatgctgaccaaaccgtgtttagtaaattaaacaaagaaaatgaatactctccctgaacattcatgtgacgtgttgattatcggtagcggcgcagccggactttcactggcgctgcgcctggctgaccagcatcaggtcatcgttctaagtaaaggcccggtaacggaaggttcaacattttatgcccagggcggtattgccgccgtgtttgatgaaactgacagcattgactcgcatgtggaagacacattgattgccggggctggtatttgcgatcgccatgcagttgaatttgtcgccagtaatgcacgatcctgtgtgcaatggctaatcgaccagggggtgttgtttgatacccacattcagccgaatggcgaagaaagctaccatctgactcgtgaaggtggacatagtcaccgtcgtattcttcatgccgccgacgccaccggtagagaagtagaaaccacgctggtgggcaaggcgcagaaccatccgaatattcgcgtgctggagcgcagcaacgcggttgatctgattgtttctgacaaaattggcctgccgggcacgcgacgggttgttggcgcgtgggtatggaaccgaaataaagaaacggttgaaacctgccacgcaaaagcagtggtactggcaaccggcggtgcttcaaaagtttatcagtacaccaccaatccggatatttcttctggcgatggcattgctatggcgtggcgcgcaggctgccggattgccaatctcgaatttaatcagttccaccctaccgcgctgtatcacccacaggcacgcaatttcctgttaacggaagcactgcgcggcgaaggcgcttatctcaagcgcccggatggcacgcgttttatgcccgattttgatgagcgcggcgaactggccccgcgcgatattgtcgcccgcgccattgaccatgaaatgaaacgcctcggcgcagattgtatgttccttgatattagccataagcccgccgattttattcgccagcatttcccgatgatttatgaaaaattgctcgggctggggatagatctcacgaaaaaacccgtgccgattgtgcctgctgcacattatacctgcggtggtgtaatggttgatgatcatgggcgtacggacgtcgagggtttgtatgccattggcgaagtgagttataccggcttacacggcgctaaccgcatggcctcgaattcattgctggagtgtctggtctatggctggtcggcggcagaagatatcagcagacgtataccttatgcccacggcgtcagtacgttaccgccgtgggatgaaagccgcgttgagaaccctgacgaacgggtagtaattcagcataactggcacgagctacgtctgtttatgtgggattacgttggcattgtgcgcacaacgaagcgcctggaacgcgccctgcggcggataaccatgctccaacaagaaatagacgaatattacgcccatttccgcgtctcaaataatttgctggagctgcgtaatctggtacaggttgccgagttgattgttcgctgtgcgatgatgcgcaaggagagccgtggcctgcatttcacgctggattatccggaactgctcacgcattccggtccatcgatcctttctgccggcaatcattacataaacagataaaaagcctgggtcagcgccgtatacgcttcggaatagttctggtctggcccacgaatgactaagcgatcgctaaagcattctcccgcctgcggggagaatgccagcagcacccgatgcggcagtcgcgcttcgttttccgccacatccgtccgcaaacgtaaatgccagcccatacttaatgccagttcagtaaaaccattaccaatctgctctggcagcaccacgcagaaaaatccctcttcggtaatgcactccgccgcacaagtcagcaacgatgggtgatcaagcgtagtggtatagcgagcctgttcccgttgaggtgtcgcgcactctactccctgctgatagtaaggtgggttgctgatgattaaatcgaagcgtactgtctgctgtgtgatccactgcagaatatccgccgtatggacgttaatccgctctgcccacggggactggttgatattttcctgcgcttgcgcggcagcttcactttccagttcaactgcatcaatcatcacgctgtcatctgttcgctgcgccagcattaatgccaacaacccgctacccgcgccgatatcaaggcaacgttttaccccagccacaggtgcccatgcgcccagcaaaatgccatccgttcccactttcatcgcacagcgatcgtgagcaacaaaaaactgtttaaaagtaaatccattacgacgaaacacggatgtagactgtgacatgaaaataaaaccttgcaggaaaaacggcgatagcaccgggtgagaacaatacccgagaagcgatatccatacaaacagatgaagattgcagccgtaacgtctataatcagcgccccacacagaggtagaacatgactgtaacgactttttccgaacttgaactcgacgaaagcctgctggaagccctccaggataaaggtttcactcgcccgaccgccattcaggctgccgccattccgcctgcgctcgatggccgtgatgtactcggttctgcgccgacaggcaccggtaaaacggcggcgtatctgctgccagcgttgcagcacctgctcgatttcccacgtaagaaatccggtccgccgcgtattttgatcctcaccccgactcgcgaactggcgatgcaggtggccgatcatgcccgcgaactggcgaaacatacgcatctggatattgccaccatcaccggcggcgtggcctatatgaaccacgcagaagtgttcagcgaaaaccaggacattgtggtcgccacgaccggacgtctgctgcaatacataaaagaagagaacttcgattgccgcgcggttgaaacgctgatcctcgacgaagcagaccgtatgctggatatgggcttcgcccaggatatcgaacatattgctggcgaaacgcgctggcgtaaacagaccctgctcttttcggcaacgctggaaggcgatgcgattcaggactttgccgagcgtctgttggaagatccggtggaagtttctgccaatccgtctacccgtgagcgcaaaaaaattcatcagtggtattaccgcgccgatgatcttgagcataaaaccgcgttgctggtgcatctgttaaaacagccggaagcgacccgctcaattgtgtttgtgcgtaagcgtgagcgtgtgcatgagctggcaaactggctgcgcgaagcaggcatcaacaactgctatctcgaaggtgagatggtacaaggcaagcgtaacgaagcgattaaacgcttgaccgaaggccgcgtaaacgtactggttgctaccgatgttgccgcgcgcggtatcgacattcctgacgtcagccacgtctttaacttcgatatgccgcgcagtggcgatacttatttgcaccgtatcggacgtaccgcgcgcgccggtcgtaaaggcaccgcgatttcgctggtggaagcccatgaccatctgctgctgggcaaagttggtcgctatattgaagaaccaattaaagctcgcgtaattgacgagttacgcccgaaaacgcgtgcgccaagcgagaagcagaccggcaagccatcgaagaaagtactggcaaaacgcgccgagaagaaaaaagctaaagagaaagagaagccgcgggtgaaaaaacgccatcgcgacaccaaaaatattggtaagcgccgtaaaccaagcggaacgggcgtgccaccgcaaacgacagaagagtaatctcaatgccgggtttaagcccggcattgtttttatcccggcaaaaaacactcttcaacacactgaataaaagtgtgcatcgccgggctaaccgcttttccggcatggtgagcgcacattgccgtaatggtctgcgactgttcgccaaaaggcaattcaattaattctccgcactccaactcttttaccaccgcaaaacgcggcaggtaactgactccgatatttgccgcgacacaacgcttgatgctttcgatacttataagctcaatggtgttttccaccgtgatccgccgctggcgcagcgtgctctcaaatatctgccggaagacacattgtggttcgttgataataaagctacaggcgttatgtcttcccggctcagtaaaatcgacatctgcaatttgcggtgaagccaccagcgccagcggttgttcacccaactctcgtcggttcagagcatcatcattccctacgcgataaaaaaccccgacatcggcctcatcattcagtagcgcatcacggatcacgtaacagttcagcgactgcaacgataaacgcacttttggagcgcgttgccgaaaacgctgcaacacctgcggcattcgataagagagcaacgtttcgcctgaaataacgcgtagttccccgtccggatccgactcttttttcgcagcctcacgaagcgtatccatcactcgggtaagttcatagatgtgcggcagcagcttttttccttcgcgggtaaggcacattcgtcgaccaattttctcaaacaattgtaccgagaactcctgctcaagctgctgaatatgaaaagtcaccgtcgattgtgtgcagcacaatttttgcgaagctcgcaaaaaggaaccctcttccaccacggttttaagtgtaataaaacggcgcagatccataaccccaaacctatcgaaaatatcgaatttagaatgtaaaaacattcatttttttaaatgttccgtgtcgggtactgtctaccaaaacagaggagataacaagtgacaccgacccttttaagtgctttttggacttacaccctgattaccgccatgacgccaggaccgaacaatattctcgcccttagctctgctacgtcgcatggatttcgtcaaagtacccgtgtgctggcagggatgagtctgggatttttgattgtgatgttactgtgtgcgggcatttcattttcactggcagtgattgacccggcagcggtacaccttttgagttgggcgggggcggcatatattgtctggctggcgtggaaaatcgccaccagcccaacaaaggaagacggacttcagacaaaaccaatcagtttttgggccagctttgctttgcagtttgtgaacgtcaaaatcattttgtacggtgttacggcactgtcgacgtttgttctgccgcaaacacaggcgctaagctgggtagttggcgtcagcgttttgctggcgatgattgggacgtttggcaatgtgtgctgggcgctggcggggcatctgtttcagcgattgtttcgccagtatggtcgccagttaaatatcgtgcttgccctgttgctggtctattgcgcggtacgcattttctattaacgaaaaaaagcggaagaggtcgccctcttccgcttagtaacttgctacttaagccttacaggctttcagtaaaggtacgagcgataacgtcgcgctgctgttccggagtcagagagttaaagcgaactgcataaccggatacacggatggtcagctgcggatatttttccggatgcttaactgcatcttccagcgtttcacgacgcagaacgttaacattcaggtgttgaccaccttcaacgcgaacttctggtttcacttctactggaacttcacggtattcaatgtcacccagtttgcttactgcaaccacttcgtcttctgcaaaacctgctttcgcaacgatgcaacgcgcttcgcctttttcgctgtccagcaaccagaaagagttcagcagatcgtcgttagcggctttagtaatctggatacctgtaatcatgtgatgcctccccggcaaaattatttgatttgttcagcctgtcgcggccaattggtaaaaccattgttgcttgagtgtatatatactcctcaaacacccttgattctttgatttaaatcaataaaaaccatatatcaagtgtggtcacaaatggattttattgttttacatcaacttatgcagatgtgaaattttaccaatttacatttttttgcatgtctttttgtctataaaatgagcatgattttgttctgtagaaagaagcagttaagctaggcggattaaagattcgcaggagagcgagatggctaacgaattaacctggcatgatgtgctggctgaagagaagcagcaaccctattttcttaatacccttcagaccgtcgccagcgagcggcagtccggcgtcactatctatccaccacaaaaagatgtctttaacgcgttccgctttacggagttgggtgacgttaaagtggtgattctcggtcaggatccttatcacggaccaggacaggcgcatggtctggcattttccgttcgccccggcattgcgacaccaccgtcactgctgaatatgtataaagagctggaaaatactattcccggtttcacccgccctaatcatggttaccttgaaagctgggcgcgtcagggtgttctgctgctcaatactgtcttgacggttcgcgctggtcaggcgcattcccacgccagcctcggctgggagacgtttactgataaagtcatcagcctcataaatcagcatcgcgaaggcgtggtgtttttgttgtggggatcacatgcgcaaaagaaaggggcgattatagataagcaacgccatcatgtactgaaagcaccgcatccgtcgccgctttcggcgcatcgtggattctttggctgcaaccattttgtgctggcaaatcagtggctggaacaacgtggcgagacgccgattgactggatgccagtattaccggcagagagtgagtaaatttgcgggaaaatgccggatggcagagttgccatccggctgatttatcaggctttattctgacgccaccattcgccaagaagaacgccggttgcgacagagatattcagcccggcaacgttgccagtaccatcaatcttcacgcgcagatcgttcggatcgcgtgcggcatccggtaacccttcatattcctgacccagcaccagtaccattttcgctggcagactggttttgaacagcggtttaccctgctcgctggaagttgtcactacggtgtaacccgcctgacggaaatcatccagcacgttaacaatgttgtcgccagtaatcggctgaacgtgctctgcgccgccttctgcggtacggatagccgccccagactccagcagtgctgcatcctgcaccacaacacctttcacgccgaagtgcgcacagctacgcatcatgccgcccaggttatgcgggttagattcgttttccagggccagtacacaatcctgcgcgcctgcctggcttacccactgctgcacggttgtaccgttacgctttttgatcaggaagcaaacgccgccgtgatgttccgtgcctgacgcttttgtcagttccgcttcatccaccacatggtacgctttgcggtttgccgccatccagcgcaaggctcctttaaaacgtggcgttacgctctggataaaccaggcgcgaacaatcgcttccggacggctctggaacagtgcctgacaggcgttttcgccgtagacgcgggtttcttccgcacgctgacgacgcaaaacttccggatcaataaaacttttaccactgatgccaccgtgatcggccttttccggcgtctcatcacccggcgcgcgggaaaccgtgcgccacggcgaatcttcccacttgcggtcacggtgctgactctgtttgtcatcgcgggcggggcgacggccaccgtcagtacgagattttcctggacgcccgccccctttcccggtacgcgggttgtgggtacgtttatcagaatcatcatcactgcggacatacatcactttgaccttgccgcttttacctttcatttcatcgttcatgcttttctccaccagcgctgcgcgaagcgcgcagattacccgaagtccgcgcggttcgccatgatttcgttccaaagcctgtgtctatcatacccattgaataaaacagattgttgtctggaacaatgtccccgataatatgtaacatattagaaacataccggcgtcgttgccgataagtctccttactcatcccgaggttagttatgaataccgtttgtacccattgtcaggccatcaatcgcattcccgacgatcggatcgaagatgcggcaaaatgcggacgctgcggtcacgacttgtttgacggagaggtgattaatgcgaccggtgaaacgctcgacaaattgctgaaagatgatctacctgtggtgatcgacttctgggcaccgtggtgcggcccctgccgtaatttcgcaccaatttttgaagatgtcgcgcaagagcgtagcggtaaagtgcgctttgtgaaagtgaataccgaagctgaacgtgaattgagcagccgctttggtattcgcagtattccgacgatcatgattttcaaaaatggtcaggttgtcgacatgcttaatggcgcagtgccgaaagcgccgttcgatagctggctgaatgaatctctttaatcttaccggggcgcatcttgtgccccgttttctcctctgcgacaatggcgttttttcgacgctcccttatgaccgaaaacgctgttctccagttacgcgccgagcgtattgcgcgtgcaacacgtccttttcttgcccgcggtaatcgcgttcgtcgctgccaacgctgtcttttgccagagaaattatgtctctgttcgacaattaccccagcacaagcaaaaagtcgcttctgtttgctgatgttcgacaccgagccaatgaagcccagtaataccgggcgtctgattgctgatattttgcctgataccgttgcgtttcaatggtcgcgtaccgaaccctcgcaagatttgctggatctggtgcaaaacccggactatcagccaatggtggtctttcccgcttcgtatgctgatgagcaacgggaagtgatcttcacaccacctgccggtaagcctccgctatttatcatgctcgatggtacctggccagaagctcgcaagatgtttcgtaaaagtccgtatctggataatcttcccgtcatttccgtcgatctttctcggctttctgcctatcgcctgcgtgaagcccaggctgaaggccaatattgtactgccgaggtagccatcgcactgttagatatggccggcgataccagggcggcgacagggttaggcgagcattttacccgctttaaaacacgctatctggcaggaaaaacgcaacatccgggaagcatcacagcagaacagttagaaagcgtttaaaatcattcggtcacttctgcgggagaccggtatgagtcagcgaggactggaagcactactgcgaccaaaatcgattgcggtaattggcgcatcgatgaaacccaatcgcgcaggttacctgatgatgcgtaacctgctggcgggaggctttaacggaccggtactcccggtgacgccagcctggaaagcggtgttgggtgtgttggcctggccgggtattgcccgcttgccctttacacccgaccttgcggttttatgtaccaatgccagccgtaatcttgctcttctggaagagctcggcgagaaaggctgtaaaacctgcattattctttccgccccggcatcgcaacacgaagatctccgcgcctgcgccctgcgccataacatgcgcctgctaggaccaaacagtctgggcttactggctccctggcaaggtctgaatgccagcttttcacctgtgccgattaaacgcggcaagctggcgtttatttcgcaatcggctgctgtctccaacaccatcctcgactgggcgcaacagcgtgagatgggcttttcctactttattgcgctcggcgacagcctggatatcgacgttgatgaattgctcgactatttggcgcgcgacagtaaaaccagcgccatcctgctctatctcgaacaattaagtgatgcgcgacgttttgtttcggcggcccgtagcgcctcacgtaataaaccgattctggtgattaaaagcggacgtagcccggcggctcaacgtctgttgaacaccacggcaggaatggatccggcgtgggatgcagctattcagcgtgccggtttgttgcgggtacaggacacccacgaactgttttcggcggtggaaacccttagccatatgcgcccgctgcgtggcgaccggttgatgattatcagcaacggtgctgcgcctgccgcgctggcgctggatgccttatggtcacgcaatggcaagctggcaacgctaagcgaagaaacctgccagaaactgcgcgatgcactgccagggcatgtggcaatctctaacccgctcgatctgcgcgatgacgccagcagcgagcattatgtcaaaacgctggacattctgctccacagccaggattttgatgcgctgatggttattcattcgcccagcgccgctgctcccgcaacagaaagcgcgcaagtattaattgaagcggtaaagcatcatccccgcagcaaatatgtctctttgctgacgaactggtgcggcgagcactcctcgcaagaggcacgacgtttattcagcgaagccgggctgccgacctaccgtactccggaaggaaccatcactgcttttatgcatatggtcgagtaccggcgtaatcagaagcaactacgcgaaacgccggcgttgcccagcaatctgacttccaataccgcagaagcgcatcttctgttgcaacatgcgattgccgaaggggctacgtcgctcgatacccatgaagttcagcccatcctgcaagcgtatggtatgaatactctccctacctggattgccagtgatagcaccgaagcggtacatattgccaaacagattggctatccggtggcactgaaattgcgctcgccggatattccacataaatcggaagttcagggcgtcatgctctacctacgtacagccaatgaagtccagcaagcggcaaacgctattttcgatcgcgtaaaaatggcctggccgcaggcgcgggtccacggcctgttggtgcaaagtatggctaaccgtgctggcgctcaggagttgcgggttgtggttgagcacgatccggttttcgggccgttaatcatgctgggtgaaggcggtgtggagtggcgtcctgaagatcaagccgtcgtcgcactgccgccgctgaacatgaacctggcccgctatctggttattcaggggatcaaaagtaaaaagattcgtgcacgcagtgcgctacgcccattggatgttgcaggcttgagccagcttctggtgcaggtttccaacttgattgtcgattgcccggaaattcagcgtctggatattcatcctttgctggcttctggcagtgaatttaccgcgctggatgtcacgctggatatcgcgccgtttgaaggtgataacgagagccggctggctgtgcgcccttatccgcatcagctggaagaatgggtagaattgaaaaacggtgaacgctgcttgttccgcccgattttgccagaagatgagccacagcttcagcaattcatttcgcgagtcaccaaagaagatctttattaccgctactttagcgagatcaacgaatttacccatgaagatttagccaacatgacgcagatcgactacgatcgggaaatggcatttgtagcggtacgacgaattgatcaaacggaagagatcctcggcgtcacacgtgcgatctccgaccctgataacatcgatgccgaatttgccgtgctggttcgctcggatctcaaagggttaggcttaggtcgacgcttaatggaaaagttgattacctatacgcgagatcacggactacaacgtctgaatggtattacgatgccaaacaatcgtggcatggtggcgctggcccgcaagctcgggtttaacgttgatatccagctcgaagaggggatcgttgggcttacgctaaatcttgcccagcgcgaggaatcatgagtaaggtactggaaatgttgaccacttaatcgggactggtgttattattgcccgcttatgtcgtctgcattgcacagaggacccttcaatgaacagagaagaaatgcactgtgatgttgtcaaaatttaagcgtaataaacatcaacaacaccttgcccaactacccaagatttctcaatcagttgatgatgtcgatttcttttacgctcccgccgacttccgggagacgctgctggaaaaaatagccagcgcgaagcagcgcatttgcattgtcgccctgtatctcgaacaggatgacggtggcaaaggcattctgaacgcgttgtatgaggctaaaaggcagcgtccggaactggatgtgcgggtgctggtcgactggcatcgtgcacaacgtggacgcattggcgctgcggcatctaacactaacgctgactggtactgccgcatggcgcaggaaaatccgggcgtagatgttccggtttatggcgttccaatcaatacccgtgaagcccttggtgttctgcactttaaaggctttatcatcgacgatagcgtactttatagcggtgccagcctgaacgatgtttacctgcatcagcacgataaatatcgctacgaccgttatcatctgatccgtaaccgtaagatgtcagacattatgtttgaatgggttacacagaatattatgaatggccgcggcgttaatcgtctggatgatgttaatcggccaaaaagcccggaaatcaagaacgatattcgtctgttccgccaggagctgcgtgatgccgcttatcatttccagggcgatgccgacaacgatcagctttccgtaacgccgctagtggggctggggaaatcgagtctgttgaacaagactattttccatcttatgccttgtgccgagcagaaactaaccatctgcacaccttacttcaacctaccagcaatccttgtgcgcaatattatccagttgctgcgcgaagggaaaaaggtcgaaattattgttggtgataaaaccgcgaatgacttctacattccggaagatgaacctttcaagataattggcgcattgccttatctctatgagatcaatctgcgtcgtttcctgagtcgtttacagtattacgtcaacactgaccagttagtagttcggttatggaaagatgacgacaacacctatcacctgaaagggatgtgggttgatgataagtggatgttgatcaccggtaataacctgaacccgcgcgcctggcgtctggatctggaaaacgccattttgatccacgatccgcaactggagcttgcgccacagcgagagaaagaactggatctgatccgcgagcataccaccatcgttaagcactaccgcgatctgcaaagtattgccgattatccggtgaaggttcgtaaactcatccgccgtttgcgccgtatccgcatcgaccgattaattagccgcatcctgtaatcacaaccccgtcctgtacggggtttgttttttggaggccacgttttgcgtattctttttgtctgttcgctattgttactttctggatgcagccatatggctaacgatagctggagcgggcaggataaagctcaacactttatcgcctcggcgatgctttccgccgccggaaatgaatattcacagcatcaggggatgagccgggatcgcagtgccatgtttggattgatgttctctgtcagtctgggggcgtcaaaagagctttgggatagccgccctgaggggagcggctggagctggaaggattttgcctgggatatcgccggtgcaagcaccggctataccgtctggcaactgacccgtcactaaagccgcatcccttttcctttacggtgcaatgttagtgaaaccagaaacgccaccacggccatcaaggtcacataccagaagaaggctgtttccattcctattgatttcagcgacaacgctacgtactccgccgacccaccaaatatagcattggcgaccgcatatgacagaccaacgcctaatgcgcgaacctgtgccgggaacatctcagccttcagtattccactgattgaagtataaaaactcactatcagcagggcgcacatcaccagaccaaaagcggcataaggcgaggaaacgttctgcaatgctgagagaataggaacggtaaaaatggttgccagagaaccgaaacataacattgaggtacggcgaccaatcttatccgacagcgcgccaataagtggttgaataagcatgaatacaaacaatgcggcagtcataatgccactcgccacgttggcatgcattcccgcagtatttaccagatacttctgcatataagtggtgaaggtatagaaacaaagggagcccgcagcggtaaaaccgagaaccatgatgaatgcacggcgattgcgccataatcctttcagagatccagcttcttttaaagcgcgtgtttcttgttgtgaagtttcatctaactgacgacgtaaccacaacgccacaacagctaacacagcccctaacgcgaaaggaatacgccatccccactctctgagtacagcgtcttccatggtgtgttgtaaaaccacgacaaccagtagagctagcagttgcccgccgatcaacgtcacatactgaaatgatgcgtaaaaacctttgcgcccttcaacggcaacttcactcatataggtggcgctggtgccatattctccgccaacggataatccctggaataaacgcgcgagaagcaataatgccggagcccaggtaccgattgtttcgtagcctggcaaacaggcgataaccagtgagccgaaacacatcatacacaccgataacagcatcgattttttgcgaccatgtttatcggctatgcggccaaacagccaaccgcctattgggcgcatcagaaatcctgcagcaaaaacacctgctgtttgcagtagttgagtcgtcgtgttcccggaagggaagaagatgtgggcgaagtagagtgaacagaacgagtagacatagaaatcgaaccactcgaccagattacctgaagaggccccaacaattgcccaaatgcggcgacgagtatcactacttgtcagtttgctgtctgccgttacagtactttcagccatgccattatgtctcctgccgtaatccaatgcttttgtcggtcgcttttgtttattttttggtaagaaaaatgttatacatttgttgcatatcattatgcaaccttaaccatgaatttagttagcaggaaaatggttattaaggagcttaaggatagatttctggtaaggaggaagtatggaagtgggcaatttggggaagacgtattcgctgttgaatctggcttatgtgggagtataagacgcgccagcgtcgcatccggcatttattccgcaccaacgcaaaaaagcccagtcttccgactgggcctttcgcttaatttgatgcctggcagttccctactctcgcatggggagaccccacactaccatcggcgctacggcgtttcacttctgagttcggcatggggtcaggtgggaccaccgcgctaaggccgccaggcaaattctgtttcattaacccgcttgtcgccggttaatctaatctgtatcaggctgaaaatcttctctcatccgccaaaacatcttcggcgttgtaaggttaagcctcacggttcattagtaccggttagctcaacgcatcgctgcgcttacacacccggcctatcaacgtcgtcgtcttcaacgttccttcaggaccctcaaggagtcagggagaactcatctcggggcaagtttcgtgcttagatgctttcagcacttatctcttccgcatttagctaccgggcagtgccattggcatgacaacccgaacaccagtgatgcgtccactccggtcctctcgtactaggagcagcccccctcagttctccagcgcccacggcagatagggaccgaactgtctcacgacgttctaaacccagctcgcgtaccactttaaatggcgaacagccatacccttgggacctacttcagccccaggatgtgatgagccgacatcgaggtgccaaacaccgccgtcgatatgaactcttgggcggtatcagcctgttatccccggagtaccttttatccgttgagcgatggcccttccattcagaaccaccggatcactatgacctgctttcgcacctgctcgcgccgtcacgctcgcagtcaagctggcttatgccattgcactaacctcctgatgtccgaccaggattagccaaccttcgtgctcctccgttactctttaggaggagaccgccccagtcaaactacccaccagacactgtccgcaacccggattacgggccaacgttagaacatcaaacattaaagggtggtatttcaaggtcggctccatgcagactggcgtccacacttcaaagcctcccacctatcctacacatcaaggctcaatgttcagtgtcaagctatagtaaaggttcacggggtctttccgtcttgccgcgggtacactgcatcttcacagcgagttcaatttcactgagtctcgggtggagacagcctggccatcattacgccattcgtgcaggtcggaacttacccgacaaggaatttcgctaccttaggaccgttatagttacggccgccgtttaccggggcttcgatcaagagcttcgcgttaccgctaaccccatcaattaaccttccggcaccgggcaggcgtcacaccgtatacgtccactttcgtgtttgcacagtgctgtgtttttaataaacagttgcagccagctggtatcttcgactgatttcagctccacgagcaagtcgcttcacctacatatcagcgtgccttctcccgaagttacggcaccattttgcctagttccttcacccgagttctctcaagcgccttggtattctctacctgaccacctgtgtcggtttngggtacgatttgatgttacctgatgcttagaggcttttcctggaagcagggcatttgtcgcttcagcaccgtagtgcctcgtcatcacgcctcagccttggttttccggatttgcctggaaaaccagcctacacgcttaaaccgggacaaccgtcgcccggccaacatagccttctccgtccccccttcgcagtaacaccaagtacaggaatattaacctgtttcccatcgactacgcctttcggcctcgccttaggggtcgactcaccctgccccgattaacgttggacaggaacccttggtcttccggcgagcgggcttttcacccgctttatcgttacttatgtcagcattcgcacttctgatacctccagcaaccctcacaggccaccttcacaggcttacagaacgctcccctacccaacaacacatagtgtcgctgccgcagcttcggtgcatggtttagccccgttacatcttccgcgcaggccgactcgaccagtgagctattacgctttctttaaatgatggctgcttctaagccaacatcctggctgtctgggccttcccacatcgtttcccacttaaccatgactttgggaccttagctggcggtctgggttgtttccctcttcacgacggacgttagcacccgccgtgtgtctcccgtgataacattctccggtattcgcagtttgcatcgggttggtaagtcgggatgacccccttgccgaaacagtgctctacccccggagatgaattcacgaggcgctacctaaatagctttcggggagaaccagctatctcccggtttgattggcctttcacccccagccacaagtcatccgctaatttttcaacattagtcggttcggtcctccagttagtgttacccaaccttcaacctgcccatggctagatcaccgggtttcgggtctataccctgcaacttaacgcccagttaagactcggtttcccttcggctcccctattcggttaaccttgctacagaatataagtcgctgacccattatacaaaaggtacgcagtcaccccattaagaggctcccactgcttgtacgtacacggtttcaggttctttttcactcccctcgccggggttcttttcgcctttccctcacggtactggttcactatcggtcagtcaggagtatttagccttggaggatggtccccccatattcagacaggataccacgtgtcccgccctactcatcgagctcacaatatgtgcatttttgtgtacggggctgtcaccctgtatcgcacgcctttccagacgcttccactaacacacacactgattcaggctctgggctcctccccgttcgctcgccgctactgggggaatctcggttgatttcttttcctcggggtacttagatgtttcagttcccccggttcgcctcattaacctatggattcagttaatgatagtgtgtcgaaacacactgggtttccccattcggaaatcgccggttataacggttcatatcacctcaccgacgcttatcgcagattagcacgtccttcatcgcctctgactgccagggcatccaccgtgtacgcttagtcgcttaacctcacaacccgaagatgtttcttgcgattcatcatcgtgttgcgaaaatttgagagactcacgaacaactctcgttgttcagtgtttcaattttcagcttgatccagatttttaaagagcaaatatctcaaacatcacccgaagatgagttttgagatattaaggcaggtgactttcactcacaaaccagcaagtggcgtcccctaggggattcgaacccctgttaccgccgtgaaagggcggtgtcctgggcctctagacgaaggggacgtgtcagtctgcttcgcaagacgccttgcttttcactttctatcagacaatctgtgtgagcactgcaaagtacgcttctttaaggtaaggaggtgatccaaccgcaggttcccctacggttaccttgttacgacttcaccccagtcatgaatcacaaagtggtaagcgccctcccgaaggttaagctacctacttcttttgcaacccactcccatggtgtgacgggcggtgtgtacaaggcccgggaacgtattcaccgtggcattctgatccacgattactagcgattccgacttcatggagtcgagttgcagactccaatccggactacgacgcactttatgaggtccgcttgctctcgcgaggtcgcttctctttgtatgcgccattgtagcacgtgtgtagccctggtcgtaagggccatgatgacttgacgtcatccccaccttcctccagtttatcactggcagtctcctttgagttcccggccggaccgctggcaacaaaggataagggttgcgctcgttgcgggacttaacccaacatttcacaacacgagctgacgacagccatgcagcacctgtctcacggttcccgaaggcacattctcatctctgaaaacttccgtggatgtcaagaccaggtaaggttcttcgcgttgcatcgaattaaaccacatgctccaccgcttgtgcgggcccccgtcaattcatttgagttttaaccttgcggccgtactccccaggcggtcgacttaacgcgttagctccggaagccacgcctcaagggcacaacctccaagtcgacatcgtttacggcgtggactaccagggtatctaatcctgtttgctccccacgctttcgcacctgagcgtcagtcttcgtccagggggccgccttcgccaccggtattcctccagatctctacgcatttcaccgctacacctggaattctacccccctctacgagactcaagcttgccagtatcagatgcagctcccaggttgagcccggggatttcacatctgacttaacaaaccgcctgcgtgcgctttacgcccagtaattccgattaacgcttgcaccctccgtattaccgcggctgctggcacggagttagccggtgcttcttctgcgggtaacgtcaatgagcaaaggtattaactttactcccttcctccccgctgaaagtactttacaacccgaaggccttcttcatacacgcggcatggctgcatcaggcttgcgcccattgtgcaatattccccactgctgcctcccgtaggagtctggaccgtgtctcagttccagtgtggctggtcatcctctcagaccagctagggatcgtcgcctaggtgagcctttaccccacctactagctaatcccatctgggcacatccgatggcaagaggcccgaaggtccccctctttggtcttgcgacgttatgcggtattagctaccgtttccagtagttatccccctccatcaggcagtttcccagacattactcacccgtccgccactcgtcagcaaagcagcaagctgcttcctgttaccgttcgacttgcatgtgttaggcctgccgccagcgttcaatctgagccatgatcaaactcttcaatttaaaagtttgatgctcaaagaattaaacttcgtaatgaattacgtgttcactcctgagacttggtattcatttttcgtcttgcgacgttaagaatccgtatcttcgagtgcccacacagattgtctgataaattgttaaagagcagtgccgcttcgctttttctcagcggcgcggggtgtgcataatacgctttcccgccacagagtcaagcatttatttttgctttctctgccggaattctcaggagaatcccgctgacccggcggcgtgtttgccgttgttccgtgtcagtggtggcgcattatagggagttattccggcctgacaagcaaaaaatataaaaactttattgttcgctcatttttcaggcaaaacatctttaatatagtcttttccgtctaacttatagacaaaaacgagccccgaaggctcgttttatcattactggacggcgacgatccggtcttcattaacttccaggcgaataactttacccggaaccaattcaccagacagtatttgctgtgccagcgggttttcgatctgctgctggatagcacgtttcagaggacgtgcaccatagaccggatcgtaaccgttctcgctcagcagtttcagcgcctcgtcagaaatgtggatttcataaccacgttcttccagacgtttgtacagacgtttcaactgaatctgcgcaatcgacgcaatgtgttgttcacccagcggatggaagacgacgacttcatcgatacggttaatgaattccggacggaagttatggcttaccacaccgagcaccagctctttcatgtgcgcataatccagttcaccaaaacgttcctgaatcagatcggaaccgaggttagaggtcataatgacgaccgtattacggaagtcgaccgttctcccctgcccgtcagtcagacgcccatcatccagtacctgcaacagaatgttgaagacatccggatgcgctttttccacttcatccagcaggatgacggaatacgggcgacgacgcaccgcttcggtcagatagccaccttcttcataaccaacatatcccggaggcgcaccaaccagacgagacaccgagtgtttctccataaactcggacatatcgatacggaccatcgcctcgtcgctatcaaacataaagttcgccagcgccttacaaagctctgttttccccacacccgttgggccgaggaacaggaatgaaccaatcgggcgatttggatccgccagccccgcacggctacgacgaatagcgttagataccgcatcaaccgcttcgttctgaccaataacgcgatggtgcagttcttgctccatacgcagcagtttttcgcgctcgctttccatcatgcgagaaaccggaattcccgtccaacgcgccagcacttcagcaatttcggcatcggtcactttattacgcaacagacgcatagttttgccttcgagctgcgttgcggcttccagttgcttttccagttccgggattttgccgtattgcagttcagacatccgcgccaggtcacccacacggcgagcctgttcaatagcgattttcgcctgttccagttccgctttaatggtctgcgtaccagaaagcgaggctttctctgctttccactcttcttctaactcggagtactgacgttctttgtcgctcagttcttcgttgagcatatccaggcgttttttactggcttcatcagactctttcattaacgcctgttgttccagtttgagctggatgatacgacgatcgagtcggtcgagttcttctggttttgagtcaatctgcatacgaatgctggatgctgcttcatcgatcaggtcgatggctttatccggcagctgacggtcagcaatgtagcgatgagacaacgtcgctgctgcaacaattgccgggtcagtaatttgcacatggtggtgcagctcgtaacgttctttcaggccacgcagaatagcaatggtatcttcaacagaaggctcggcaacaaacactttctggaaacgacgttccagcgcagcatctttttcgatgtactggcgatattcgtcaagcgtcgtggcacctacgcagtgcaattcaccacgcgccagtgcaggtttcagcatgtttccggcgtccattgcgccatcggctttacccgcgccgaccatggtatgtaattcgtcgataaacaggatgacgttgccttcctgtttagcaagatcgttaagtacgccttttaaacgttcttcaaactcaccgcgatatttcgccccagccaccagcgcgcccatatccagcgccagtacgcggcggcctttcaacccttcgggcacttcgccgttgataatacgctgcgccagaccttcaacgatggcagttttaccgacgccgggttcaccaatcaataccgggttatttttagtacgacgttgcagcacctgaatggtacggcgaatttcttcatcacgaccaatcaccggatcgagtttgccttgttcggctcgttcggtaaggtcgatggtatattttttcaaagcctgacgttggtcttcagcaccttgatcgttcacgctttcacctccacgcatttgttcaatcgcttgagtaatgttggcggtggtcgcccctgctgctttcaggatgtcggccagcgtgccgcgagactcaagtgccgccagaacgaacagttctgacgagataaagttatcaccacgtttttgcgccagcttgtcgcaaagattaagaacgcgcaccagatcctgtgatggctggacatcaccaccagtaccttcaacctgcggtaaacgatttaatgcctgatttatatctgtgcgcaactggccagcatttatgccagcggatgttaataaaggactaaccgaacccccttcctgattcagcagggcgctcattaaatgaagtggttcgatgaattggttgtcgtgcccgagtgcaagtgattgggcatcggcaagagcaagctggaatttattagtaagacgatccagacgcataactcctcccataacggatcaaagttgctactggagattaaatgaggtcatccctcaattattcaaggttattgaccagattaatgtgaaaagaaaatcacgcgtaccggatcgtcttgattctttaggttatatcagccaaatgaaacttgccatacgaccggtggtcttgtcgcgacgataagagaagaaagtctcattttccgtatatgtacaacggtcgccgccgaaaatttgttcaacaccaacgctcgccagacgctgccgggcaagctgataaatatccgccagatacttatcaccatgctgaatgaaagctgtactcgctttggcgtctactgccataaacgcctcgcgaacctccgcccccacttcaaacgcgcgtggaccaattgccggccctaaccaggcgagaatattttccggattatcagcaaaacaggaaaccgtctcttccagcacgcctgcgcacagtccacgccagccagcatgagcggcggcgacttccgttcccgctcgattgcaaaacagcacagggaggcaatcggcagtcatcactgcgcaaaccgtgccgggcgtattgctataagaggcatctgctcgttttgaggcataaggttcaccagtaagcttaagcacatctttgccgtgtacctgctcaagccagaccggtttagaaggcaaattgcccgcagcaaaaagtcgcttgcgattctcctcaacgtgatccgggttatcaccacaatgagcgccaaggttgagagagtcgtaaggcggcaagctcacgccgccgatacgggtagagctacaggccgcaacaccttttggcagcggccactgcgggacaatcagcttactcataaccagtccacttcatccttatgctcttcgaaatcggcgcgcatcacctcaatcagctccaccatatcttgtggaataggcgcatgccattccatttcgataccggagatcgggtgataaagacgcagcatggttgcatgaagcgcctggcggtcaaacttacgcagcgtggagataaacgcttccgaagcaccttttggcggacgcggacggccaccataaaccggatcgcccaccagcggatgagtgatatgggccatatgcacgcggatctggtgcgtacgtccagtttccagacgcaaccgcagacgcgtgtgcacacggaagtgttccatgatgcgatagtgtgtgaccgccggtttacccatcggatgcaccgccatgtgagtacgtttggtcgggtggcggctgattggttcatctactgtaccgccagcggtcatatgaccaattgccaccgcttcatactcacgagtaatttcacgccgttgcaaagattcgactaaacgcgtctgagccggaacggtttttgccacaaccatcaggccggtggtgtctttatccagacgatggacgatgcccgcacgcggtacatcggcaatgggcggatagtaatgaagcaacgcattcagtaccgtaccatccgggttacccgcgccaggatgtaccaccaggtcgcgtggtttattaatgacgatgatatcttcatcttcatagacgatatccagcgggatatcctgcggttcaaaacgcgcttcttcttcaatctcagcgttgatggccacctgctcgccacccaatactttttctttcggcttatcacacactttgccgttaaccagcacgcgctggtcgaggatccattcttttattcgcgaacgtgaataatccgggaacatttcggccaaagcctgatctaagcgttgaccgagttggttttcggacaccgttgcagtgagctgtactcgttgtgccatatatactgcttcttcgtttatcgttggggttttacggctttgccgtttaatatagtgtgctattgtagctggtcttaaccgggagcaggaacagagaatctcccgtattacattttgaggaaagtcaaaacgtcatgacgcgcatgaaatatctggtggcagccgccacactaagcctgtttttggcgggttgctcggggtcaaaggaagaagtacctgataatccgccaaatgaaatttacgcgactgcacaacaaaagctgcaggacggtaactggagacaggcaataacgcaactggaagcgttagataatcgctatccgtttggtccgtattcgcagcaggtgcagctggatctcatctacgcctactataaaaacgccgatttgccgttagcacaggctgccatcgatcgttttattcgccttaacccgacccatccgaatatcgattatgtcatgtacatgcgtggcctgaccaatatggcgctggatgacagtgcgctgcaagggttctttggcgttgaccgtagcgatcgcgatcctcaacatgcacgagctgcgtttagtgacttttccaaactggtgcgcggctatccgaacagtcagtacaccaccgatgccaccaaacgtctggtattcctgaaagatcgtctggcgaaatatgaatactccgtggccgagtattatacagaacgtggtgcatgggttgctgtcgttaaccgcgtagaaggcatgttgcgcgactatccggatacccaggctacgcgtgatgcgctgccgctgatggaaaatgcataccgtcagatgcagatgaatgcgcaagctgaaaaagtagcgaaaatcatcgccgcaaacagcagcaatacataacagaaacctgaaacacaaaacggcagccttgagctgccgtttttttattctgttagttgtgaaactgaagcgatttagtcactatcgatctcatcaaatatggctcgctttgagatattcctcaagtaaaaaaacacctcttcctgcgatttctcacaaaaaagattcgttgacaaaaagtgacaaaattatgagatttccatcacacattttgacatcaggaacgttatgctgaattcaccaagacgggaagacaagaggtaaaatttatgacaatgaacattaccagcaaacaaatggaaattactccggccatccgccaacatgtcgcagaccgtctcgccaaactggaaaaatggcaaacacatctgattaatccacatatcattctgtccaaagagccacaagggtttgttgctgacgccacaatcaatacacctaacggcgttctggttgccagtggtaaacatgaagatatgtacaccgcaattaacgaattgatcaacaagctggaacggcagctcaataaactgcagcacaaaggcgaagcacgtcgtgccgcaacatcggtgaaagacgccaacttcgtcgaagaagttgaagaagagtagtcctttatattgagtgtatcgccaacgcgccttcgggcgcgttttttgttgacagcgtgaaaacagtacgggtactgtactaaagtcacttaaggaaacaaacatgaaacacacaccgtttttcttcgcattcttttttaccttcccctgaatgggaggcgtttcgtcgtgtgaaacagaatgcgaagacgaacaataaggcctcccaaatcggggggccttttttattgataacaaaaaggcaacactatgacatcggaaaacccgttactggcgctgcgagagaaaatcagcgcgctggatgaaaaattattagcattactggcagagcgacgcgaactggccgtcgaggtgggaaaagccaaactgctctcgcatcgcccggtacgtgatattgatcgtgaacgcgatttgctggaaagattaattacgctcggtaaagcgcaccatctggacgcccattacattactcgcctgttccagctcatcattgaagattccgtattaactcagcaggctttgctccagcaacatctcaataaaattaatccgcactcagcacgcatcgcttttctcggccccaaaggttcttattcccatcttgcggcgcgccagtatgctgctcgtcactttgagcaattcattgaaagtggctgcgccaaatttgccgatatttttaatcaggtggaaaccggccaggccgactatgccgtcgtaccgattgaaaataccagctccggtgccataaacgacgtttacgatctgctgcaacataccagtttgtcgattgttggcgagatgacgttaactatcgatcattgtttgttggtctccggcactactgatttatccgccatcaatacggtctacagccatccgcagccattccagcaatgcagcaaattccttaatcgttatccgcactggaagattgaatataccgaaagtacgtctgcggcaatggaaaaggttgcacaggcaaaatcaccgcatgttgctgcgttgggaagcgaagctggcggcactttgtacggtttgcaggtactggagcgtattgaagcgaatcagcgacaaaacttcacccgatttgtggtgttggcacgtaaagccattaacgtttctgaccaggttccggcgaaaacgacgttgttaatggcgaccggacaacaagctggtgcactggttgaagcgttgctggtactgcgcaatcacagtctgattatgacccgtctggaatcacgtccgattcacggtaatccgtgggaagagatgttttatctggatattcaggccaatcttgaatcagcggaaatgcaaaaagcattgaaagagttaggggaaatcacccgttcgatgaaggtattgggctgttacccaagtgagaacgtagtgcctgttgatccaacctgatgaaaaagtgccggatgatgtgaatcatccggcactggattattactggcgattgtcattcgcctgacgcaataacacgcggctttcactctgaaaacgctgtgcgtaatcgccgaaccagtgctccaccttgcggaaactgtcaataaacgcctgcttatcgccctgctccagcagctcaatcgcctcgccgaaacgcttatagtaacgtttgattaacgccagattacgctctgacgacataataatgtcggcataaagctgcggatcctgagcaaacagtcgcccgaccatcgccagctcaaggcggtaaatcggcgaagagagcgccagtagttgctcaagctgaacattttcttctgccaggtgcagcccataagcaaaagtagcaaagtggcgcagagcctgaataaacgccatattctgatcgtgctcgacagcgctaatacgatgcaaccgagcgccccagacctgaatttgctccagaaaccattggtatgcttccggcttacgtccatcacaccagaccacaacttgctttgccaggctaccgctgtccgggccgaacatcgggtgtaaccccagcaccgggccatcgtgcgccgccagcatggcctgtaatggtccatttttcaccgatgccagatcaaccagaatacaatctttcggtaaaggcggtaatttgccgataacttgctcagtaacgtggatgggcacactaacaatcaccattccggcatcggaaacaatatcagccgctcgatcccagtcatgttgctccagaatccgcacctgataacccgagagtgtcagcatcttctcgaacagacgtcccatctgaccgccaccaccgacgataaccaccgggcgcagtgacggacaaagcgttttaaatcctttgtcgttttcactggagtaagattcacgcatcacccgacgcaaaacatcctcaatcagatctggcggtacacccagagcttccgcctctgcacgacgcgaggccaacatagatgcctcgcgctccggaacataaataggcagtccaaagcggcttttcacctcgcccacttcagcaaccagttccagacgcttcgctaataaattcagcagcgctttatcgacttcatcaatttgatcgcgtaatgcggtcaattcagcaaccataataaacctcttaagccacgcgagccgtcagctgcccgttcagatcctgatgaatttcacgcagcaaggcatcggtcatttcccagctaatgcaggcatcggttacggatacaccgtatttcatttcactgcgcggttgctcggaagactgattgccctcgtggatattactttcgatcatcagaccaataattgagcgattgccatctttgatttgagcaaccacggattctgccaccgcaggctgacggcgataatctttattggaattaccgtggctgcaatctaccatcagagacgggcgcagtcccgcctgttccatctctttttcacattgcgcaacatccgcagggctatagtttggcgctttaccaccgcgcaggatcacatgcccgtccggattcccctgagtttgtagcaacgcaacctgccctgcctggttaatgccaacaaaacggtgcggctgggcggcggcacgcatagcgttaattgccgttgccagactgccatcggtgccgtttttaaaaccaaccggcatggaaagcccggaggccatttcacggtgagtttgcgattccgttgtacgagcaccaattgctgaccagctaaacagatcgcccaggtattgcgggctattcggatctaacgcttccgtcgccagtggcagtcccatattcaccagctcaagcagcaatttacgcgcgatctgcagcccggcttctacatcaaaagagccatccatatggggatcgttaattaaccctttccagccgacagtggtacggggtttttcaaaatagacgcgcattaccagatagaggctatcgctgacctctgcggcaagggctttaaatcgacgagcatattccagagcagtttccggatcatgaatggaacaaggaccacatactaccagcagacgaggatcgcgcccggcgataatatctgaaatggttttacgcgagtcagcaatctgggcttcttgttgcaggcttaatggaaaagcggccttcagttgttccggagtcattaaaacctgttcgtcggtaatatgtacgttattcagcgcgtctttctgcatgatggcgatcctgtttatgctcgtttgcgatagttgatcctcagcgaggatgacgtaacgataacacataaagtaaagttttcaatccatatttcgtacatatttctttacacaagcaatttattcgcgctttttccccttatttctgtataaataaatttacaccagctttaaaaacaatccgctatgctttgaaaaaggagaaaaaaatgatgaaaaaatttatcgcccccttgttggctttactggttagcggatgtcagattgatccttatactcacgcgccaaccttgaccagcaccgactggtatgatgttggtatggaagatgcgatatcgggcagcgccattaaagatgacgatgcatttagcgattcacaggcggatcgcggtctataccttaaaggatatgccgaagggcaaaagaaaacttgccagaccgattttacttatgcccggggactttctggtaaaagctttcctgccagctgcaataatgttgaaaataccagccaactgcatgaagtatggcgaaaaggggctgatgaaaatgccagcacaatacgattaaattaattaccccccaaatcaattaagcatgagattttactcattatgttttatttctcacattgatgacgaccgcatgaaaggatgatattttaatgagcattctgaaaaaatatcgatgcatttcgagcgaagatggtgaggatccctgaatgcgtttttctcaccgactgttcttactgctgattctcctgctgacgggagcaccaatactcgctcaggaaccttctgacgttgcgaaaaacgtgcgtatgatggtttccggtattgtcagttacacccgctggcctgggctatcagggccaccaaagttatgtatcttttcatcttcacgttttagtaccgccttacaagaaaatgctgccacatctttaccttatctgcctgtcatcattcatactcaacaagaggcgataatttcaggctgcaatggtttttattttggcaacgagtcaccgacattccagatggaattaaccgaacaatatccgtcaaaggcgttattattaattgccgaacaaaataccgagtgcattattggtagcgccttttgtctgatcatccacaataatgacgtcagatttgccgtaaacctggatgccttatcgcgtagcggtgtaaaagtcaacccggatgtcttaatgctcgcacggaagaaaaatgatggataacgataattctcttaataagcgccccacgtttaaaagagcattacgcaacatcagtatgaccagcatatttatcactatgatgctgatctggctgctgctttccgtgacgtcagtgctgaccctgaaacagtacgcgcaaaaaaacctggcactgacagcagcaacaatgacttacagtctggaagcagctgtcgtttttgccgatggccctgcagcaactgaaacactggcagcgctgggccagcaaggccaattttcaactgcagaagtgcgtgataagcagcaaaatattctggcatcctggcattacacccataaggaaccaggcgatactttcagcaatttcataagccactggctcttccctgcccccatcattcagccgattcgccacaatggtgaaactattggcgaagtacgcttaactgctcgcgacagttcaatcagccattttatctggttttcgctcgctgtcctgaccggttgtattctgctggcatcaggcatcgcaattaccctcacccgccatttgcacaatggcctggtggaagcgctgaaaaatatcaccgatgtcgtacatgatgtgcgttctaaccgcaatttttcccgacgagtttcggaagaacgtatcgctgagtttcaccgcttcgctctcgacttcaacagtctgctggatgaaatggaagagtggcagcttcgtttacaggccaaaaatgcgcagcttctacgtaccgcgctacatgacccattaaccgggctggctaaccgcgcagcgtttcgtagcggcatcaacacgttgatgaacaattccgatgcccgaaaaacgtcggcgttactatttcttgatggcgataatttcaaatatatcaatgatacctggggtcatgcgacgggcgatagagtcttgattgaaatagcaaaacggttagctgaatttggcgggctgcgacataaagcataccgcctgggcggcgatgaattcgctatggtgctctatgatgtacagtcggaatctgaagtgcagcagatatgctcagcactgacacaaatttttaatctcccgtttgatcttcataatggccatcagactaccatgacattaagcattggttacgcgatgactattgagcacgcctctgcggaaaatttacaagagcttgccgatcacaatatgtatcaggccaaacaccagcgtgccgaaaagctggtgagataacaaggatatatcgatatgataaagcacctgctagcacccctgattttcacctcgctaatacttactggctgccagtcccctcagggaaagtttactcctgagcaagtcgccgctatgcaatcttatggatttactgaatccgccggcgactggtcgctgggcttatcagatgccattctgtttgcaaaaaatgactacaaattgctcccggaaagccagcaacagatccaaaccatggcagccaaattggcctcgacagggctaacacatgcccgtatggatggacacaccgacaactatggtgaagacagttacaacgaagtcttatcattgaaacgggcgaatgtcgtggccgatgcatgggctatgggtggacaaattccgcgcagcaatctcaccactcagggtttaggaaaaaaatatcccatagccagtaacaagaccgcccagggccgcgccgagaaccgccgcgtcgcagtggtgattacaaccccttaaaacacgagcaaacagacaaaaaaagggccagccaattggccagcccttcttaacaggatgtcgcttaagcgaaatcttagttaagacgctctttgatacgagcagccttaccagtacgctcacgcaggtagtacagtttagctttacgaacagcaccacgacgtttgacagaaatgctgtcaactaccggagagtgagtctggaagacacgctcaacgccttcgccgttggaaattttacgaacagtgaatgcagagtgcagaccgcggttacgaatagcgataaccacgccctcgaatgcctgcagacgttttttggaaccttcaacaacccatactttcacttccacggtatcacccggacggaaggaaggtacgtcctgcttcatctgctcttgttcaagttgcttaataatgttgctcataatttaatctcttatcctgggtaaactgatatctcgggggcttacgccatcccatcatgtttatgttgctgttgtgcgtgttccgttttgaactccgccagcaaccttgcttgctcttcagtcagagccaggttttccagaagttcaggtcttctaagccaggtacggcccagcgactgtttcaaacgccagcgacgtatctcggcatggttgcccgacagtaacactggcggaacttccatcccttctaacacctcaggccgcgtatagtgcgggcaatccagcaatccttcagcaaaggaatcttccgttgccgaggcttcatgtcccagtactcccggaataaaccgggaaacggagtcaatcagcgtcattgctggtaactcaccaccactgagaacgtaatcgccgattgaccattcttcgtcaatttcggtttggatcacgcgctcatctataccttcgtagcgaccacacaccagaatcaatttttgattcgttgccagttcgctgacgcccgcttgatcaagcttgcgtccctgtggtgacagataaatcacctttgcgccttcgcccgccgcggcttttgctgcatgaatggcgtcccgcaagggttgcaccatcattaacatccccggtccgccgccgtaaggacgatcgtccacggtacggtgccggtcatgcgtgaagtcgcgaggactccagctctggatgctcagcaggccatttttaactgcccggccagttaccccgtaatcggtaattgcgcggaacatttcaggaaacaggctaattatgccaatccacatagcgccgtcttttaccgtttatccggtggtttaaaaaccaggatcccaatctacttcgattgaacgtgtagtgagatcgactttcttgataacctgcccatcgaggaacggtacgagacgttccttgataccaaacgcatctttcaggtttgccttaatgacgagaacgtcattagatccggtttccatcatatctacgactttaccgagatcgtagccttcagtggttactacctggcagcccatcaggtctttccagtagtagtccccctcttcaagctgaggcaactgcgatgaatccacgacaatttcacaattcgtcagcaggttcgccgcatcacgatcgtcaacgcctttcagcttgatgatcatgtcctgattgtggtgcttccagctttccagctggacttgctgccactgacccgccttctggataaaccagggctgatagtcaaaaatgctttcggcgtcttcggtggaagaaaacactctgagccacccacgaataccgtaagacgaccccatttttcccaaaacgatgggatcaacaggtgcttgcgcggtgagttgtttgctcatcatgaccaccgtgacagattaagctgctttgtttacttctttgatcagcgcagcaacgcgatcagaaatagttgcgccctggccaacccagtgagcgatgcgatccagatccaggcgagtgccttcttctttttcgctagcgattgggttgaagaaaccaacgcgctcgatgaagcgaccgttgcgtgcattacggctgtcagcgacaacaacctggtagaacggacgctttttagcgccgtgacgtgctaaacgaatagttaccataacatcctcttgtgtgaataaaacaaccggaccccatcgaggaacggagtccggtgtcatattaaaagcccgaaaattttactgatttctggagaaaatgcaatcagcagttaataactctgtcgcataaggtcatttagcgaccaggaaatcccggcggcatcatccctttcatgcttctcatcatcttcgccatcccgcccttcttcattttcttcatcatgcgctgcatgtcgtcgaactgtttcagaagacggttaacgtcctgcacctgcataccgcaaccggcagcgatacgacgcttacgcgaacctttgatgatttctggcttagcgcgctctttcatcgtcatcgagttgatgatggcttccatacgcaccagcactttatcgtccatctgtgacttgacgttatccgggatctgccccatgcccggtagcttgcccatcaggctagccatgccgcccatatttttcatctggcgcagctgctcaagaaagtcgttgagatcgaagccgtcgccttttttcagcttgctggctaatttctctgcctgcgcgcggtcaaccttgctttcgatatcttcgatcagtgacagtacgtcgcccatgccgagaatacgggaggcaatacggtccggatggaatggctccagcgcctcggttttctcgccaacaccgaggaacttgatcggtttgccagtgatgtgacgaatagagagcgccgcaccgccgcgggcatcgccgtccactttggtcaacactacaccggtaagcggtaacgcttcattgaatgcttttgccgtattggccgcatcctgaccggtcatggcatcgaccacaaacagggtttcaaccggattaatcgacgcatggacttgtttgatctcgtccatcatcgcttcgtcaacgtgcagacgaccggcagtatccaccagcagcacgtcgtagaatttcagtttggcttctttcagcgccgcgttaacgatatctaccggcttctgaccaacatcagaagggaagaaatcaacgcccacctgctctgccagcgtctcaagctgtttgattgccgccgggcgatagacgtcggcagaaaccaccagcactttcttcttgtgcttctcgcgcaggaacttaccgagtttaccaacgctggttgttttaccggcaccttgcaggcccgccatcagcacgaccgcaggcggttgcgcagccaggttcagggtctggttctcttcgcccatcgccgcaaccagttcgttacggacaattttgacgaactcctgccccggcgtcaggctcttattaacttcatgaccaaccgctttctcttttacgcgattgataaactcacgcactaccggcagagcgacgtccgcctccagcagcgccatgcgcacttcgcgcagcgtatcttttacgttgtcttcagtgaggcgtccacggccactgatattgcgcagcgtgcgcgacaaacgatcggttaaattatcaaacattgtctctcgcctggggtggaaacggttggccgcaatcgcgacacatcatcagtattttgccgcagtataacatgaaggcgtctttgttgttatgcaacggttggagcagcgttcacctgacgctatactgcttctctttcttattgctcaaactgtcgacattactatgcccgtttttgctctgctcgcgcttgtcgcctactccgtcagtcttgcgctgattgttcccggtctgctgcaaaaaaacggcggctggcggcgcatggctattatttctgcggtcatcgcgctggtctgccacgcaatcgctctggaagcccgcatcctgcccgacggtgatagcggacaaaacctcagcctgctgaacgttggttcattggtcagtttgatgatctgtacggtaatgaccattgtggcttctcgcaatcgtggctggttgttgctacccattgtctatgcctttgcgcttatcaacctggcgctggcgaccttcatgcccaatgaatacatcacccatctggaagcaacgccggggatgctggtgcacattggcttatcgcttttttcctatgccacgctaattatcgctgccctgtacgcgctgcaactggcgtggattgattaccaactgaagaacaagaagctggcgtttaaccaggaaatgcctccattgatgagtatcgagcgtaaaatgttccatatcacgcagattggcgtggtgctgctaacgctcactctttgcactggcctgttctacatgcacaacttatttagcatggaaaatatcgacaaggccgtgctctctatcgtggcgtggtttgtctatattgtgctgctgtggggacattatcatgaaggatggcgtggacgccgcgtcgtctggtttaacgttgcgggtgcagtcattctgacactggcctacttcggcagccgaattgtccagcagttaatcagctaaccccagaaaaggagtttcccctggaacacatttctactactacgttgatcattattctgatcatcatggtggtcatttcagcctatttttccggttcagaaactggaatgatgacactcaaccgctatcgcctgagacacatggcgaagcaaggtaatcgctcggcaaaacgcgtcgaaaaattactgcgcaagccagaccgcctgataagcctggtgttaatcggcaataatctggtcaatatccttgcttccgcactcggcactattgtcgggatgcgcttgtatggcgatgctggcgtggcaattgcgactggcgtgctgaccttcgtagtgctggtttttgctgaagtattgccgaaaaccattgccgcactgtacccggaaaaagtcgcctatccgagtagttttctactggcgccgctacaagtcctgatgatgccgctagtctggttactaaatgccatcacccgaattttgatgcgtatgatgggtattaaaaccgatatcgtagtcagcggctctttgagtaaagaagagttgcgcaccatcgtgcacgaatcacgctcacaaatttcccgtcgcaatcaggatatgctgctgtcggtgctcgatctggaaaagatgaccgtcgatgacatcatggtgccgcgcagtgaaattatcggtattgatatcaacgatgactggaaatcgattctgcgccaactctcccactcacctcacgggcgcatcgtgctctaccgtgattcgctggacgacgccatcagtatgctgcgtgtgcgtgaagcctggcgactcatgtcggagaaaaaagagttcaccaaagaaaccatgctacgcgccgcggacgagatctattttgtcccggagggtacgccgctcagcacacagttggtgaagtttcagcgcaacaaaaagaaagtcggactggtcgtcaacgagtatggagacattcagggactggtgacggtcgaagatattctcgaagagattgtcggcgatttcaccacgtcgatgtcgccaacacttgccgaagaggtcacgccgcaaaacgacggttcggtgattattgatggcactgccaacgtgcgagaaattaacaaagcctttaactggcatctaccggaagatgatgctcgtactgttaacggcgtcattctggaagcgctggaggagatcccggtagcaggcacccgcgtgcgtataggcgagtacgatatcgatattctcgacgtacaggacaatatgattaagcaggtaaaagtttttcctgtaaaaccgctgcgcgagagtgtggcggagtaacgaaaacggcccggcattcgcatgctgggccgtgatttattacgaaagcagaaattaagcttttgctttcgctacagtcaccatcgccgcacgaatcgtacgaccgttcagcgtataacctttctgcataatgcccagtacgttacctggcgcaacgtcatcagattccaccattgcgatggcctgatgcacatttgggtccagtgggacgttggtttcggcgatcacttcaacgccaaacttacgcacaacatccagcatcgacttcagcgtcagctcaataccttcaaccatcgcggacatatccgggttagctttatcagccacttccagcgcacgatccaggctatcaatcaccggcagcaattcgttgatgaatttctccagcgcgaatttgtgggctttttcgatatccagttcagtacgacgacgcaggttttccatttcggcttttacgcgcaaaatgccgtcacgttcacgggtctgggcttcagccagctgagcttcgagattcgcaattttttcatcgcgcggatccacctgctcagcagaagcttctggctcaactgcctcaatctcttcgtgctgatccatgataatttcttccggggcttgcccctcaggcgttttctgttctttactactcatgaatttctccgcgtttttttcgcattcatctcgctaacttcgcttattatggggatcagtttcagggtttcaagggaagcactcacattgtcatcaatcttcgcaacaaggacctcggaaaaatgaataatcatttcaagtgtattggcattgtgggacacccacggcaccccactgcactgacaacacatgaaatgctctaccgctggctgtgcacaaaaggttacgaggtcatcgttgagcaacaaatcgctcacgaactgcaactgaagaatgtgaaaactggcacgctcgcggagattgggcaacaggctgatctcgcggttgtcgttggcggcgacggtaatatgctgggcgcggcgcgcacgctcgcccgctacgatattaaagttattggaatcaaccgtggcaacctgggtttcctgactgaccttgatcccgataacgcccagcaacaattagccgatgtgctggaaggccactacatcagcgagaaacgttttttgctggaagcgcaagtctgtcagcaagattgccagaaacgcatcagcacggcgattaacgaagtggtacttcatcctggcaaagtagcgcatatgattgagttcgaagtgtatatcgacgagatctttgcgttttcgcagcgttccgatggactgattatttcgacgccaacaggctccaccgcatattccctctctgcgggcggtcctattctgacaccctctctggatgcgattaccctggtgcccatgttcccgcatacgttgtcagcacgaccactggtcataaacagcagcagcacgatccgtctgcgtttttcgcatcgccgtaacgacctggaaatcagttgcgacagccagatagcacttccgattcaggaaggtgaagatgtcctgattcgtcgctgtgattaccatctgaatctgattcatccgaaagattacagttatttcaatacattaagcaccaagctcggctggtcaaaaaaattattctaattttacgccagcctctttactgtatataaaaccagtttatactgtacacaataacagtaatggtttttcatacaggaaaacaactatgttggcacaactgaccatcagcaactttgctatcgttcgtgagcttgagattgattttcatagcggcatgaccgtaataactggcgagaccggcgcgggtaaatctattgcaatagatgccctcggcctttgtctcggtggtcgcgctgaagccgacatggtgcgtaccggcgctgctcgtgccgacctgtgcgcccgtttttctctgaaagatacgccagcggccctgcgttggctggaagaaaaccagcttgaagacgggcatgaatgtttgcttcgtcgcgtaatcagcagcgatggtcgctcccgtggtttcatcaacggtacagctgttcctctgtcacaactgcgcgaactgggtcagttgctgattcagatccatggtcagcacgctcatcagttactcaccaaacccgagcaccaaaaattcctgcttgatggctatgccaatgaaacctctcagctccaggaaatgaccgcacgttatcagttgtggcatcaaagctgccgtgacctcgcgcatcatcagcagttaagtcaggaacgcgccgcccgtgcggagctgctgcaataccaattaaaagaacttaacgaatttaatccgcagcctggagagtttgagcaaatcgacgaagagtacaaacgtctggcgaacagcggtcaattgctgaccaccagccagaatgcattggcattaatggctgacggtgaagacgcaaatctgcaaagtcaactttacacggctaaacaactggtgagcgaattgattggcatggacagcaaactgtccggcgtacttgatatgctggaagaggctaccatccagattgctgaagccagtgatgaactacgccactactgcgatcgtctggatctcgatcccaaccgactgtttgaacttgaacagcgcatctcaaaacagatttcgctggcacgtaaacatcacgtcagccctgaggcattgccacagtattaccagtcgctactggaagaacagcagcaactggacgatcaggccgactcacaagaaacgctcgcgctggcggtaacgaaacatcatcagcaggcactggaaacggcgcgcgcgttacaccagcaacgccagcattatgcaaatgagttggcacagctgatcaccgatagtatgcatgcactctctatgccacatgggcagtttacgatcgatgttaaatttgacgagcatcacctgggcgctgacggcgctgatcgtattgagtttcgggtaaccaccaacccaggtcagccaatgcagcctattgccaaagtcgcatccggtggtgagttgtcccgcatcgcattggcaatccaggtcattaccgcgcgtaaaatggaaaccccggcactgatttttgatgaagtggatgtagggattagcggcccaacagcggcagttgtcggcaaactgctacgtcaacttggcgaatcaactcaggtgatgtgtgttacccacctgccacaagtcgcgggatgtggtcatcaacactattttgtcagcaaagaaaccgatggtgcgatgacagaaacgcatatgcaatccctggataaaaaagcgcggttacaagagttggcgcgcctgcttggtggcagtgaagtcacacgtaacacactggcgaatgcgaaagaactgcttgcggcgtaaacttttttcctgcttcacggtcagagtaaacagcaaaacgccgtaagaccggaaagcaaaaggttttaaagtgatgaaaggtctattatcatcggcatattacagatgagccacgtactgctcgggcccgaaaaggaatcaaatcactatgcgctgtaaaacgctgactgctgcagcagcagtactattgatgttgaccgcaggctgttccactctggagcgagtggtttaccgtcctgacatcaaccaggggaactatctgaccgctaacgacgtatccaaaatacgtgttggcatgacgcaacaacaagttgcgtacgcattgggtacaccgctgatgtccgatccatttggtacaaatacctggttctatgtcttccgccagcaacctggtcatgaaggtgtaacgcagcaaacgctgacgctgacctttaacagtagcggtgtgttgaccaacattgataacaaacctgcgctgagtggtaactaataataaagttgctctcaaagacgttaaaaaaggtgctcaatgagcaccttttttctgtctgttatttattcgctgatttttctgctcgttgcctgcgaagctctttcggatcggcaatgagaggacgataaatctccacccgatcgccatcatgcacaatatcgctgagttttgccggacggctgtaaatgccgactttgtttttagttaaatcgatatcggtacgcaattccagcaaaccactggcgcgaatagcttcttcaaccgtcgcgccctcctgcaacgtcacgcgctgcaggtactgcttctcaggtagcgcataagccacctcaacggcaattttacctggcactgtagacctcttttgcacgaacagtaaaagcctgcaccatattagctgccagctctttaaacacacgaccaaaggcgagttcaatcaacttattggtaaactcaaagtcgagatgaaactcaatacggcacgcgtcctggctcaacggcgtaaacttccaaccgccgatcaatttcttaaacggtccatcaaccagactcatgagaatactttgattactggtcaactggttgcgggttgtaaacgttttgctgatcccagccttagacacatctaccgcagcagtcatctgcccaggagtggactccagaatccgacttccggtacaacccggcaaaaactgaggataagactgaacgtcattcactaactgatacatttgctccgcgctgtagggcaccagtgcggtccgactaatctgaggcataacaatttccatcaacaaaaatccaacaaataatatcatttatcctgctgtaaaaaaaacgctatcccggcgctgggtaacatcgggttcatgctaagatagagccttgtcccccgcaggattgatatggggtgttttcgatttcagattaccgatgattcacgacgcttatgacgaagaaaaaagcacataaacctggttcagcgaccatcgcgcttaacaagcgcgcccgtcacgaatactttatcgaagaagagttcgaagcgggacttgccctgcaaggctgggaggttaaatccctgcgcgcaggaaaagccaatatcagcgacagctatgtccttctgcgcgacggagaggcatttctgtttggcgctaacatcacgccaatggctgtggcctccacgcatgtggtgtgcgatcctacccgtacccgcaagttacttctcaaccagcgcgaactggactcattgtacggtcgcgtcaatcgagaaggctataccgtagtggcgctctccctgtactggaaaaatgcctggtgcaaagtgaaaatcggcgtcgccaaaggtaagaaacagcacgataaacgttcagatatcaaagaacgcgaatggcaggtggataaagcgcgtatcatgaaaaatgcccaccgttaaacctatataagcgatactaatcaaatcctcaccgcgcctccctatccggtggcgcgaatgaacatcttatcgactgtcaaatctgacacagatgtagccatcccattgcttaatcgaaaaaaaatcatactatgcaggcgctaattccaggatgataacgccttttgggctagtcatgctgctcataaatctggtatacttaccgttacacattggggctgattctggattcgacgggatttgcgaaacccaaggtgcatgccgaggggcggttggcctcgtaaaaagccgcaaaaaatagtcgcaaacgacgaaaactacgctttagcagcttaataacctgcttagagccctctctccctagcctccgctcttaggacggggatcaagagaggtcaaacccaaaagagatcgcgtggaagccctgcctggggttgaagcgttaaaacttaatcaggctagtttgttagtggcgtgtccgtccgcagctggcaagcgaatgtaaagactgactaagcatgtagtaccgaggatgtaggaatttcggacgcgggttcaactcccgccagctccaccaatcatgattggacggtgtaaggactacaccaacaaaaacaggaagttataagtctcagcaggacnnnnnnnnnnnnnnnnnnnnnnnnnnnnnnnnnnnnnnnnnnnnnnnnnnnnnnnnnnnnnnnnnnnnnnnnnnnnnnnnnnnnnnnnnnnnnnnnnnnnnnnnnnnnnnnnnnnnnnnnnnnnnnnnnnnnnnnnnnnnnnnnnnnnnnnnnnnnnnnnnnnnnnnnnnnnnnnnnnnnnnnnnnnnnnnnnnnnnnnnnnnnnnnnnnnnnnnnnnnnnnnnnnnnnnnnnnnnnnnnnnnnnnnnnnnnnnnnnnnnnnnnnnnnnnnnnnnnnnnnnnnnnnnnnnnnnnnnnnnnnnnnnnnnnnnnnnnnnnnnnnnnnnnnnnnnnnnnnnnnnnnnnnnnnnnnnnnnnnnnnnnnnnnnnnnnnnnnnnnnnnnnnnnnnnnnnnnnnnnnnnnnnnnnnnnnnnnnnnnnnnnnnnnnnnnnnnnnnnnnnnnnnnnnnnnnnnnnnnnnnnnnnnnnnnnnnnnnnnnnnnnnnnnnnnnnnnnnnnnnnnnnnnnnnnnnnnnnnnnnnnnnnnnnnnnnnnnnnnnnnnnnnnnnnnnnnnnnnnnnnnnnnnnnnnnnnnnnnnnnnnnnnnnnnnnnnnnnnnnnnnnnnnnnnnnnnnnnnnnnnnnnnnnnnnnnnnnnnnnnnnnnnnnnnnnnnnnnnnnnnnnnnnnnnnnnnnnnnnnnnnnnnnnnnnnnnnnnnnnnnnnnnnnnnnnnnnnnnnnnnnnnnnnnnnnnnnnnnnnnnnnnnnnnnnnnnnnnnnnnnnnnnnnnnnnnnnnnnnnnnnnnnnnnnnnnnnnnnnnnnnnnnnnnnnnnnnnnnnnnnnnnnnnnnnnnnnnnnnnnnnnnnnnnnnnnnnnnnnnnnnnnnnnnnnnnnnnnnnnnnnnnnnnnnnnnnnnnnnnnnnnnnnnnnnnnnnnnnnnnnnnnnnnnnnnnnnnnnnnnnnnnnnnnnnnnnnnnnnnnnnnnnnnnnnnnnnnnnnnnnnnnnnnnnnnnnnnnnnnnnnnnnnnnnnnnnnnnnnnnnnnnnnnnnnnnnnnnnnnnnnnnnnnnnnnnnnnnnnnnnnnnnnnnnnnnnnnnnnnnnnnnnnnnnnnnnnnnnnnnnnnnnnnnnnnnnnnnnnnnnnnnnnnnnnnnnnnnnnnnnnnnnnnnnnnnnnnnnnnnnnnnnnnnnnnnnnnnnnnnnnnnnnnnnnnnnnnnnnnnnnnnnnnnnnnnnnnnnnnnnnnnnnnnnnnnnnnnnnnnnnnnnnnnnnnnnnnnnnnnnnnnnnnnnnnnnnnnnnnnnnnnnnnnnnnnnnnnnnnnnnnnnnnnnnnnnnnnnnnnnnnnnnnnnnnnnnnnnnnnnnnnnnnnnnnnnnnnnnnnnnnnnnnnnnnnnnnnnnnnnnnnnnnnnnnnnnnnnnnnnnnnnnnnnnnnnnnnnnnnnnnnnnnnnnnnnnnnnnnnnnnnnnnnnnnnnnnnnnnnnnnnnnnnnnnnnnnnnnnnnnnnnnnnnnnnnnnnnnnnnnnnnnnnnnnnnnnnnnnnnnnnnnnnnnnnnnnnnnnnnnnnnnnnnnnnnnnnnnnnnnnnnnnnnnnnnnnnnnnnnnnnnnnnnnnnnnnnnnnnnnnnnnnnnnnnnnnnnnnnnnnnnnnnnnnnnnnnnnnnnnnnnnnnnnnnnnnnnnnnnnnnnnnnnnnnnnnnnnnnnnnnnnnnnnnnnnnnnnnnnnnnnnnnnnnnnnnnnnnnnnnnnnnnnnnnnnnnnnnnnnnnnnnnnnnnnnnnnnnnnnnnnnnnnnnnnnnnnnnnnnnnnnnnnnnnnnnnnnnnnnnnnnnnnnnnnnnnnnnnnnnnnnnnnnnnnnnnnnnnnnnnnnnnnnnnnnnnnnnnnnnnnnnnnnnnnnnnnnnnnnnnnnnnnnnnnnnnnnnnnnnnnnnnnnnnnnnnnnnnnnnnnnnnnnnnnnnnnnnnnnnnnnnnnnnnnnnnnnnnnnnnnnnnnnnnnnnnnnnnnnnnnnnnnnnnnnnnnnnnnnnnnnnnnnnnnnnnnnnnnnnnnnnnnnnnnnnnnnnnnnnnnnnnnnnnnnnnnnnnnnnnnnnnnnnnnnnnnnnnnnnnnnnnnnnnnnnnnnnnnnnnnnnnnnnnnnnnnnnnnnnnnnnnnnnnnnnnnnnnnnnnnnnnggacgcgggttcaactcccgccagctccaccaatcatgattggacggtgtaaggactacaccaacaaaaacaggaagttataagtctcagcaggacaccgaccagacggtgaggagacaaaaaaggatacgcaacggagtcgcgactccctatgacattaaagcccgctgatgcgggcttttttattggtcctgacccgccctgaatagaattcatccaattacagtccagacatatacagtatccctcagctcagtatcagcttctcgacaaatggtcactgttatttacccgttgccagaaagagaataatttgcccccatagccagccttcctggaatctgtatattcattaatattgttatcgattccatcaagtaacataggttggatgcgattgatcttactcacattagtcgacacggaactcagtaagttgaactctgaaaaagcagtttaaatagcatttaaacaaatgccaccagttcgaaaaagagtataagcacacttaatatattgttttaattattcatttcctttcaacccaattcttatccctcacattatttgttattaatttgttgtttttgatcacaataagaaaacaatatgtaacttttatgcgcatttttcagaaatgtagatatttttagattatggctacgaaatgagcatcgccatgtcaccctacatctcataagaggatcgcttctgatgaatgcactgaccgccgtacaaaataacgctgtcgattcaggccaggactatagcggattcactctcatcccgtcggcgcaatccccgcgtctgctggaactcaccttcaccgaacagacgaccaaacagtttctcgaacaggttgccgagtggcccgtgcaggcgctggagtacaaatcgtttctgcgttttcgggtaggcaaaattctcgacgatctgtgtgcgaatcagctgcaaccgctgctgttgaagaccctgttaaaccgcgctgaaggtgcgctgttgatcaatgcggtgggtatcgatgatgtcgcgcaggcggatgagatggtgaagctggcgacggcggtggcgcatctgattggtcgctccaatttcgatgcgatgagcggtcagtattacgcgcgtttcgtggtgaaaaatgttgataactcagacagctatctgcgtcagccacaccgcgtgatggagttgcacaacgacggcacctacgtggaagagatcactgattacgtgctgatgatgaaaatcgacgagcagaacatgcagggcggtaactcgctgctgctgcatctcgatgactgggaacatctggaccactttttccgccatccgctggcgcgccgtccgatgcgctttgccgcgccgccgagcaaaaacgtcagcaaagatgtcttccatccggtgttcgatgtcgatcagcagggccgcccggtgatgcgctatatcgaccagtttgtccagccgaaagacttcgaagaaggcgtgtggttgagcgagctttccgatgccattgaaaccagtaaaggcattctttctgtacccgttcccgttggcaaattcctgttgattaacaacctgttctggctgcacggtcgcgaccgctttactccgcacccggatctgcgccgtgaactgatgcgtcagcgtggctatttcgcttacgccactcaccactaccagacgcatcagtaagcgcaaaggaattgagcggatgtatgattttgtgattattggcggcggcatcatcggcatgtcgaccgccatgcaactgattgatgtttatccggatgcccgcattgcgttgctggaaaaagagtccggcccggcctgtcaccagacgggccacaacagcggcgtgatccatgctggggtctattacacgcccggcagcctgaaggcgcagttctgcctggcgggaaaccgcgccaccaaagccttttgcgatcaaaacggcattcgctatgacaactgcggcaagatgctggtcgccacctctgaactcgaaatggaacggatgcgcgcgttgtgggaacgcacggcggcgaacggaatcgatcgcgagtggttaaacgccgaggaactgcgcgagcgcgaaccaaatatcaccgggctgggcggtatttttgtgccgtccagcggcattgtcagctaccgcgaagtgacggcggcaatggcaaaaatttttcaggccagaggcggtgagattatctataacgccgaagtcagcgccctcagtgagcataaaaacggcgtggtgatatgtacccgtcagggcggtgaatatgaagcatcgacgctgattagctgttccgggctgatggctgaccggctggtgaaaatgctcggcctcgaaccgggctttattatctgcccgttccgcggcgagtatttccgccttgcgccggagcataaccagattgttaaccacctgatttaccccattcccgacccggcaatgccgtttttgggcgtgcatctcacccgcatgatcgacggcagtgtgaccgtcgggccaaacgcggtgctggctttcaaacgcgaaggctatcgtaagcgcgacttctcatttagcgacacgctggaaattttgggctcgtcggggattcgccgggtgctgcaaaaccatctacgctcaggactgggcgagatgaaaaactcgctgtgcaaaagcggctatctgcggctggtgcaaaagtattgtccccggctttcgttaagcgatctccagccctggcccgccggtgtgcgggcgcaggcggtatcgccggacggcaagctgattgacgattttctgtttgtcaccaccccgcgcacgatccacacctgtaatgcgccctccccggcagcgacatcagcaattcctattggtgcgcatattgtcagcaaggtacaaacgctgttggcaagccagagtaaccccggacgcacgctgcgagcggcacgtagtgtggatgccttacacgccgcatttaatcaataacctttgaaaacaggatgtagcgatgaaacttaacgacagtaacttattccgccagcaggcgttgattaacggggaatggctggacgccaacaatggcgaggtcatcgacgtcaccaatccggcgaacggcgacaagctgggtagcgtgccgaaaatgggcgctgatgaaacccgcgccgctatcgacgccgccaaccgcgccctgcccgtctggcgtgcgctcactgccaaagaacgcgccaacattctgcgcaactggttcaatttaatgatggagcatcaggacgatttagcgcgcctgatgaccctcgaacagggcaaaccactggctgaagcgaaaggcgaaatcagctacgccgcctcatttattgagtggtttgcagaagaaggcaaacgtatttatggcgacaccattcccggtcatcaggccgataaacgcctgattgttatcaagcagccgattggcgtcaccgcggctatcacgccgtggaacttcccggcggcgatgattacccgtaaagccggtccggcactggcggcaggctgcacgatggtgctgaagcccgccagtcagacgccgttctctgcgctggcgctggcagaactggcgattcgcgcgggcgttccggctggcgtgtttaacgtagtcaccggttcggcgggcgcggtcggtaacgaactgaccagcaacccgctggtgcgcaagctgtcgtttaccggctcgaccgaaattggccgtcagttaatggaacagtgcgcgaaagacatcaaaaaagtgtcgctggagctgggcggcaacgcaccgtttattgtctttgacgatgccgatctcgataaagccgtggaaggcgcgctggcctcgaaattccgtaacgccgggcaaacctgcgtctgcgccaaccgcctgtatgtgcagaacggcgtgtatgaccgctttgccgaaaaattgcagcaggcggtgagcaaactgcacatcggcaacgggctggagaaaggcgtcaccatcgggccgctgatcgatgaaaaagcggtagcaaaagtggaagagcatattgccgatgcgctggagaaaggcgcgcgcgtggtttgcggcggtaaagcacatgaacgcggcggtaacttcttccagccgaccattctggtggacgttccggctaacgccaaagtgtcgaaagaagagacgtttggccccctcgccccgctgttccgttttaaagatgaagccgatgtgattgcgcaagccaatgacaccgaatttggccttgcagcctatttctacgcccgtgatttaagccgcgtcttccgcgtgggcgaagcactggagtacggcatcatcggcatcaacaccggcattatttccaatgaagtggccccgtttggcggcattaaagcctcgggtctgggtcgtgaaggttcgaagtatggcatcgaagattacttagaaatcaaatatatgtgcatcggtctttaactggagaatgcgaatgagcagcaataaagagttaatgcagcgccgcagtcaggcgattccccgtggcgttgggcaaattcacccgattttcgctgaccgcgcggaaaactgccgggtgtgggacgttgaaggccgtgagtatcttgatttcgcgggcgggattgcggtgctcaataccgggcacctgcatccgaaagtggttgcggcggtggaagcgcagttgaaaaaactgtcgcacacctgcttccaggtgctggcttacgagccgtatcttgaactgtgcgagattatgaatcagaaggtgccgggcgattttgccaagaaaactctgctggttacgaccggttccgaagcggtggaaaatgcggtgaaaatcgcccgcgccgccaccaaacgtagcgggaccatcgcctttagcggtgcgtatcacgggcgcacgcattacacgctggcgctgaccggcaaggtgaatccgtactctgcgggcatggggctgatgccgggtcatgtttatcgcgcgctttatccttgcccgctgcacggcataagcgaggatgacgctatcgccagcatccaccggatcttcaaaaatgacgccgcgccggaagatatcgccgccatcgtgattgagcccgttcagggcgaaggcggtttctacgccgcgacgccagcctttatgcagcgtttacgcgcgctgtgtgacgagcatgggatcatgctgattgccgatgaagtgcagagcggcgcagggcgtaccggcacgctgtttgcgatggagcaaatgggcgtggcaccagatctcaccacctttgcgaaatcgatcgcaggcggtttcccgctggcgggcgtcaccgggcgcgcggaagtgatggacgccgtcgcaccgggcggactgggtggcacctatgccggtaacccgattgcctgcgtagcggcgctggaagtgttgaaggtgttcgagcaggaaaatctgctgcaaaaagccaacgttctggggcagaagctgaaagacggattgctggcgatcgccgaaaaacacccggagatcggcgacgtacgcgggctgggggcgatgatcgccatcgagctgtttgaagatggcgaacacagcaaaccggacgtaaaactcaccgccgagatcgtggcacgcgcccgcgataagggtctgattcttctctcctgcggcccgtattacaacgtgctgcgcatccttgtaccgctcaccattgaagacgctcagatccgtcagggtctggaaatcatcagccagtgttttgctgaggcgaagcagtagtaccgcaccatgccggaggcgacgctgcgcgtcttgtccggactacgagaatccaggtcggataaggcgtttacgccgcatccgacaatctgtacgtgaacaggaataaatctatgtcggccggataaggcggagccgctctccggcaaaaagaaccaataacaattaaacgcgtgacccgacgcgggaaatgtcggggcgctctcccaagtgacacactttcgagaggattcaggatggggcaatcatcgcaaccacatgagttaggcggcgggctgaagtcacgccacgtcaccatgttgtctattgccggtgttatcggcgcaagtctgtttgtcggttccagcgtcgccatcgccgaagcgggcccggcggtattactggcctatctgttcgccggattactggtggttatgattatgcggatgttggcggaaatggcggttgccacgcccgataccggttcattttccacctatgccgataaagccattggccgctgggcgggctataccatcggctggttgtactggtggttttgggtactggttatcccacttgaagccaacatcgccgccatgatcctgcactcgtgggttccaggcattcccatctggttattttccctcgtcattaccctcgccttaaccggcagtaatttattaagcgttaaaaactacggcgaatttgagttctggctggcgctgtgtaaagtcatcgctatcctggcctttattttccttggtgccgtcgcaattagcggtttttacccgtatgccgacgtgagcggtatttcaagattgtgggatagcggcggctttatgcccaacggcttcggtgcggtattaagcgcgatgttgatcaccatgttctcgtttatgggcgcagaaattgtcaccattgccgccgcggaatccgacacgccggaaaaacatattgtccgcgccaccaactcggttatctggcgtatctctattttctatttgtgttctatttttgtcgttgtggcattaatcccgtggaatatgccagggctgaaagccgttggttcttatcgctcggttctggaattgctcaatattcctcatgcgaaattaatcatggactgcgtgatattactttccgtaaccagctgcctgaactcggcgctgtataccgcttccaggatgctctactccttaagccgtcgcggtgatgctcccgcggtaatgggtaaaatcaaccgcagtaaaaccccgtacgtggcggtgttactctccaccggcgcggcattcttaacggtggtggtgaactattacgcgcctgcgaaggtgtttaaatttctgatcgacagctccggcgctatcgccctgctggtttatttagtcatcgccgtttcacaattgcggatgcgcaaaattctgcgagcagaaggaagcgaaattcgcctgcggatgtggctttatccgtggctcacctggctggtcatcggctttattacctttgtgttggtagtgatgctattccgcccggcgcaacagttagaagtgatctccaccggcttattagcgattgggattatctgtaccgtgccaattatggctcgctggaaaaagctgataatgtggcaaaaaacacccattcataatacgcgctgataatgctcaggagtcacaccatgaccattacctctctggatggctatcgctggctgaagaacgatattattcgcggcaattttcagccggatgaaaaattacggatgagtttgctgacatcgcgttatgcacttggcgtcggaccgttgcgggaagcgctttcgcaactggtggcagaacgactggtcacggtggtgaatcaaaaagggtatcgggtggcgtctatgtcagagcaggagctgctcgatattttcgacgcccgcgccaatatggaagcgatgctggtgagtctggcgattgcccgcggtggcgatgaatgggaggcagacgttctcgcaaaagcgcatctgctcagtaagcttgaggcctgtgacgccagtgagaaaatgcttgatgagtgggatctgcgtcatcaggcgtttcatactgcaattgtggcgggctgtggttcttactatttgctgcaaatgcgtgaacggttgtttgatctggcagcgcgttatcgatttatctggctgcggcgaacagtgctttcggtggaaatgctggaagataaacacgatcagcaccagaccctgactgcggcggtactggcgcgagataccgcgcgcgccagtgagttaatgcgccagcatttactgacgccaattcccattatccagcaggcgatggctggcaattaactactcttcaggaatacgcaacacttgccccgggtaaattttatccgggctttttagcatcggtttattcgcttcgaagattttattgtacagattagcgttaccgtagacctgtttggaaatggcactcagagtgtcgccagacttaacggtataaaactggctggcagtggctggtgtcgccgttttcacctgatcatcgacactggcaataccggaaatattccccaccgcaacaaggattttctccttcgcctcctgacttaagccgtcaccagtgaccgtcgctttgccgtcggcaatttgaatgttcactttatcggcatcaggtataccggttttgttcagatgctcctgcaccttcttcgcctgatcgtctttatcgtgctgacctgtaaccgcgtcccagagtttttctccggcatctttcacaaaattgaacagacccatagctacctcattcgttaacggaaacactcagaaagtgtagcagaggaacgcggcgcgttaacgccgcggggatgagcacaggtttaatcgcgggtttgcacccagaacgcgtgaatcaaaccggggatatacccaagcagtgtcagcagaatattaataatgaacgcccaaccgaaccctttaccgagcagcacgccgagcggcggcagaatgatggtgatgacgattctccagaaacccatatgtactccctataagaaaattactcattgtttaaaaagagattttatctcttaagcgtagtaattttagcggagcctgccagtttcagcgtacgcttttactctcatttacgctgctgatgctggtatatgttgcacacttagtttagagtttacttaatttagataatacttaaataactatgactgaactcgcacaattacaggccagtgccgaacaggcagcggccttattgaaatcaatgagccaccctaaacgattgctgattctgtgtatgcttagcggttcccccggcaccagcgcgggagagctgacgcgcattaccggactgagtgcctctgcgacatcacagcatctcgctcgtatgcggggcgaagggcttatcgacagccaacgggatgcccaacgcattctatattccattaaaaatgaggcggtaaatgccattatcgccaccctgaaaaatgtctattgtctgtaaggagtcactatggctttgacaaccatttcgccgcatgatgcacaagaattaatcgcacgcggcgcaaagttaatcgatattcgtgatgctgatgaatatcttcgtgaacatattcctgaagcagatctggctccattatccgtactggaacagtcaggtcttccgcctaaattacgtcgcgagcaaattatattccactgccaggcaggtaaacgcaccagtaataacgccgataaattagcagcgattgccgcccccgcagaaatctttttactcgaagatgggattgatggctggaaaaaagcaggattgccagtagcggtaaataaatcccaacccttgccgttaatgcgccaggtgcagatcgccgcgggtggtttaatattaatcggcgttgtactgggttataccgtaaatagcgttttcttcttattaagcggctttgttggtgctgggttactgtttgcaggaattagtggtttttgtggaatggcaagattgttagataagatgccgtggaaccaacgagcttgagaagcgacgccggacgcgccatagcagcggcatccggcctcagtaattagatcaggaaatcgtcgagagatttaccttctgccagcgcctgagcgattggcttcggtgtacggccctgaccggtccaggttttagtttcaccgttaacatcgatgaatttatatttcgccggacgcggctggcgttttttaccagcgcgtggtgccgcagcagagctattacccaataactcttccgggttaattccgtcagctttcatcagctccagccaggtgctaattttttcctggcgctctgccagttcacgctgctgttgttcttcttcttcacgtctttctttagtgacaaccctgaatttttcgagcatttcttcaagaacgtcaatggagaattcgcgagccatcgcacggagggtgcgaatgttatttaaactttgtaacattacggacataataaagaaaaccttttaacccaaaacaaaaaagtatttcgtcgcgtagtgtaagcgatcacttattatatttccacaaaatttaatctatttacagtcctgcacgagattatttcagctgttattttctgaaactctcagaataatttcaagattatatattagccattttgatgagtaatttcggttattggtgaacagagcggcgctctctgctcgataattccgcaagcctgacaaaaccaaagtgaataaaaatgcaactcaacagaataaaagaaaacatcactcactggtgctttctgctgtcaatgtacattatctggcataaaaaatgctgaaaatgacccggtcactacatacaccgaattctctacgcttatagcgttacctcccccccaaaccttcatgagtgaaaataaaggtaaacacatatccaattgatttaattaaaaataaatcataccggcatgtaaaaatccacaatgtacaaaaaacgcgccgttacggaatattttatctacaaaaacagattaaataaaaatttttcactaattgattagtcatagccagcgatatacgctatgcgaaaatgcagatggcaatgagatccgctgctttcatctccattaacatcccattacgcttttattaaggagcattagcatgttctcaccgcagtcacgcttgcgtcatgcagttgcagatacgttcgcgatggttgtttactgttctgtcgtgaacatgtgtattgaagttttcctctccggaatgagcttcgaacagtctttttattccagattagtagcgattccggtgaacatcttaattgcatggccatacggtatgtaccgcgatctgtttatgcgcgcggcacgcaaagttagcccgtcgggctggataaaaaatctggcggatatcctggcttatgtgacgttccagtcaccggtgtatgtggcgatcttgttagtggtgggcgcagactggcatcagattatggcggcagtcagttcaaacatcgttgtttcgatgttgatgggggcggtttatggctacttcctcgattattgccgccgactgtttaaagtcagccgttaccagcaggtaaaagcctgacccttcttttcgcgactggcatcgccagtcgcgtctttaactggcttcgccaaataaaccattcaaataacgttcaagcgcaacacgcgaactaaagccatgcgggataccgtaatgctcatgacgttcacccgctaaatagagcggaaattgctggtaatgatcgcaagttttaatatcggaagcgggttcagccagtgttgaactacgttcttttaatgttggatgaatcaccagggcggtacgtcccattcgcgcttcgcgattaacatagacataattttccccacggcggtaaccatacgctttctgggttaccacatcgacagtaaaaccgactttttcaagtacgcgcgccacctcgtctggtcgtaaatacatatttgatcctcgttattatcaaccgcgggcctaccttacctgattgcgcattcacaacgctttcagaaaagtccataaagccgcgatgaacctcagttaagaaaattatggtctacactgaaaattacatcgaattctaatgggggatcatatgtttaaccgaccgaaccgcaacgacgttgatgatggcgtgcaggatatccagaatgatgtcaatcaattagctgacagtctcgaatctgtattgaagtcctggggcagcgacgccaaaggggaagccgaagccgctcgtagtaaagcgcaggctctactgaaagaaaccagggcgcggatgcatggtcgtactcgcgtccagcaagccgcgcgcgatgccgttggctgcgcggattcttttgttcgtgaaagaccctggtgtagtgtgggtacagcggcagcggtgggtatttttatcggcgcactgttaagcatgcgcaaatcgtagtgcaaaaatgataataaatacgcgtctttgaccccgaagcctggcttcggggttttttagcttaaggctttacgtaattgttgtgctacctgtcgcgccataccttcgttaacaatattagtaaacgaaagcagtaatccaccttccccacttgaacggatacgccagtcgctaagtgcctgcaccgcaaggcctgcagcattggctttacgcgcatgggcaatatcatcgcctatcattctgatcaccatctggataccacctttctgcggcacaacctgaaatccttgctgcgtcaacgcttgctcaatccattgccgacgttgagcataatgctgacgcattttcttcagatgccgccagaaatgcccctcgcgaagaaagtctgccagtgtgttctgccatagaacaggtaccgcacatggagccagtgacgcctggtggcggaattgtgcaatttgcttcaccggcaccaccagccacgcacagcgcaatgcaggaaatagcgctttgctgaatgttccggcataaattacccgctgcggtgcgtcgagactttttaacgccggtaacggcttaccgtgatagcgaaactcactgtcataatcatcttcaataatccatgcctgactacgatctgcccattccagtatctgatgcctgcgcgctaaagagagcgccacacccagcggactttggtgtgctggtgttatcagggcaaaacgcgcatcaggataattttgtattccgcttgtgatatccagtccattgtcatcaaccggcacaggcaaaatttccacatcatggcgagtgacaatcgggcgaatcagtggaaagccgggatcttctatccacatcccgtttcccggtttcgccagcgcgtgcagaattaaagctattgaggccgcataaccgtgagtgataaagacctgctctggctgacaatcaatcccacgtgaaatgcgtaagtaatcaactattgcctcgcgcaacgccacctcaccgcaaacatcgcctaacgccaaatcaaagcgcgtctgggtacgaaggcgacgccccatcacccgcgcccacagctctcgcggaaagagatcgagtgcgggtaatcccatttgaaatggcaacggttgctgactttcaccggcaaaatctacaacttgtacagtagattgttgcggatatatccgctcactgacaaatgtgccagcctgtccccgcctgatcagccatccttgcgccaccagctcagcatacgcattttcgacagtggatcgagacacccccagctcctgcgaccaggtacgacttgaaggcagccttgcgccgggtttcagttccccttgctcaatagccgtttttaactgacgggcgatatcctgatagcgcggcatatggtctgcttttttaggtaatttatggctctctttagcagtccattatagtgctacattgcgggcgttaataagaggagaaactgtatgactacattacgtcagccttactacgaacttagcccggcagtgtataacgcactagtgcaggccaaaacggcactggaaaatagcacgctggataccacgttgatggagttagtttatttgcgcgtctcgcaaatcaacggctgcgcattttgtctggagatgcacagcaaagcattgcgcaaatccggcgtgccacagcacaaactggacgccctggcaggttggcgcgtaagccatcattttgatgaacgcgagcgggcggcgctggcatgggcggaatcggtaaccgaaattgccagaacccatgcggaagacgaggtttatcagcctttgcttgagcatttcagcgcagcagagatcagcgacttaacgtttgccatcgggctgatgaattgttttaaccgtctggccgtttccatgcggatgtaacttcttgatgccgggtatttgcccggcaaaaaacacaaaatcccctaccccgttgagccattcatcggtggcgtaatcaatctaaaattcccatatcttgtgtggttgaatcttttttcaactacatctagtatctctgtatcaacagagatacaacccgacgcgtatcatcgcgccgtatcttcattttaaacggaaatacgaatcatgcgcattactatttacactcgtaacgattgcgttcagtgccacgccactaaacgggcgatggaaaaccggggctttgattttgaaatgattaatgtcgatcgcgttcctgaagcggcagaagcgctgcgtgctcagggctttcgtcagttgccggttgtgattgcaggcgatcttagctggtctggtttccgcccggacatgatcaatcgtctgcatccagcgccacacgcggccagtgcatgagccagctcgtctacttttccagcagctccgaaaatacgcagcgttttatcgaacgtttagggctgcccgcggtgcgcatcccgctcaatgagcgggaacggattcaggtagacgagccttacatcctgatcgtgccctcttacggcggcggcggtacggctggcgcggtgccacgacaggtcattcgctttttaaacgacgagcataaccgggcgttgctgcgcggcgttattgcttcgggtaatcgcaactttggtgaggcatatggccgcgccggagatgtgattgcccggaaatgcggcgtgccgtggctgtaccgctttgaactcatgggtacgcaaagcgatatcgaaaacgttcgtaaaggagtaaccgaattttggcaacgacaaccgcagaacgcctgacgcaggaaacgatggattatcacgctctgaatgcgatgcttaacctttacgatagcgcaggtcgcattcagttcgataaagatcgccaggcagtagacgcctttatgacgacgcatgtgcgtccgaacagtgtggccttcagtagccagcagcagcgcctgaactggctggttaacgaaggttactatgatgaaagcgtccttaatcgctactctcgcgattttgtcattacgctgtttgcccacgcgcacgccagcggttttcgtttccagacattcctcggagcatggaagttttacaccagctatacgttgaagacattcgacggtaagcgttatctggaagattttgccgatcgcgtcacgatggtggcgctgacgctggcacaaggcgatgaaacactggcgacgcagctcactgatgagatgctgtcaggacgctttcagccagccacgccaacattcctcaactgcggtaagcagcagcgcggcgaactggtttcctgttttctgctgcgtattgaagacaatatggagtcgattggccgggcagtgaattccgcactacaactgtcgaaacgcggcggcggcgtagcatttttgctgtcgaatctgcgggaagcgggcgcgccaattaaacgtattgaaaatcaatcttctggcgtgattccggtgatgaaaatgctggaagacgcattttcttatgccaaccagctcggcgcgcgtcagggtgctggcgcagtctatttacatgcccatcatcccgatattctgcgttttctcgatacaaagcgggaaaatgccgacgagaaaatccgcattaaaacactgtcgctgggcgtggtgatcccggatatcactttccatctggcaaaagagaatgcgcagatggcactgttttcgccttatgacgttgagcgggtttatggcaagccgtttgctgatatcgccatcagtgaacactatgccgaactggttaccgatgaacgcatccgcaaaaaatacatcaacgcccgtgatttcttccagcgactggcagaaatccagtttgagtccggctatccctacatcatgtatgaagacacggtaaaccgtgctaaccctatcgccgggcgcataaatatgagcaatctctgctcagaaattttgcaggttaacagcgcctcagagtatgacgagaatctcgactatgcccgcacaggccatgatatttcctgcaatttaggttcgttgaatattgcccacaccatggattcccccgactttgcccgcacggtagagactgccgtgcgcggtttaacggcggtgtcagatatgagtcatatccgcagcgtgccgtccatcgaagccggaaatgccgcctcacacgccatcggactggggcagatgaatttacacggctatctggcgcgagaaggcatcgcttatggttcgccggaagcactggatttcaccaatctctatttctataccatcacctggcacgcactgcgtacctcgatgttgctggcgcgcgaacgcggtgaaaccttcgccgggttcaaacagtcacgctatgccagtggtgaatatttcagccaatatctgcaagggaactggcagccgaaaactgcgaaagttggcgaactgtttacccgtagcggtattacgttacctacccgtgagatgtgggcgcagctgcgcgacgacgtgatgcgctacggcatttacaaccagaatcttcaggcggtgccgccaaccggttctatctcttatatcaactatgctacgtcgagtattcatccgattgtggcgaaagtagagatacgcaaagagggcaaaacaggacgcgtttactaccctgccccgtttatgactaacgaaaatctggcgctgtatcaggacgcttacgaaatcggcgcagaaaagatcatcgacacctacgcggaagcgactcgccatgtcgatcaggggctgtcgctgacgctgtttttccccgataccgccaccactcgcgatatcaacaaagcgcagatttacgcctggcgcaagggtatcaaaacgctctattacattcgcctgcgtcagatggcgctggaaggcactgaaattgaaggctgcgtctcctgtgcactttaaggaatatctatgaaactctcacgtatcagcgccatcaactggaacaagatatctgacgataaagatctggaggtgtggaatcgcctgaccagcaatttctggctaccagaaaaggtgccactgtcgaacgatattcctgcatggcagacattaagtgtcgtagaacaacaactaacaatgcgcgtttttactggcctgacgctgctcgacacgctgcaaaatgttatcggcgcgccctcgctgatgcccgatgcactcaccccccatgaagaggcgatattatcaaatatcagctttatggaagcggttcatgcccgctcttacagttcaattttctcgacgctgtgccagaccaaagatgtcgatgccgcctacgcctggagtgaagaaaacgcgccgttgcagcgaaaagcacagattattcagcaacattatcgcggtgatgatccgctgaaaaagaaaatcgccagtgtgtttcttgaatcttttttgttctattccggtttctggctgccgatgtatttttccagccgcggaaagctaaccaataccgcagacctgatccgtctgattatccgggatgaagcagtccacggttactacatcggctataaatatcagaaaaacctggaaaagatctcccaggcacgacgtgaagaattgaagagtttcgccttcgatttgttgctggaactctatgacaacgagttgcaatacaccgatgagctgtacgccgaaaccccgtgggctgacgatgtgacagcgtttctctgttacaacgccaataaggcgttgatgaatctgggctacgaaccactatttcccgcaggaatggcggaagtgaatccggcaatcctcgccgcgctttcgccgaatgccgatgaaaatcacgatttcttttccggttcaggctcttcatatgtgatgggaaaagcggtcgaaacagaagatgaggactggaatttctgagggtgttatttttcaaaaatatcactacccgcagcagggaaataattcccgccaaatagctttttatcacgcaaatattttgtggtgatctacactgacactctgttgcattattcgcctgaaaccacaatattcaggcgttttttcgctatctttgacaaaaaatatcaacttttctcgatttgctctcagcccttatatcatgggaaattccggcgatttgctcacatcaatattcatgccacatttgccatcaggggttgcctcagattctcagtatgttagggtagaaaaaagtgactatttccattgggtaatgtatcgacataaacaaataacaggaatctttctattgcatggcaattaaattagaaattaaaaatctttataaaatatttggcgagcatccacagcgagctttcaaatatatcgaacaaggactttcaaaagaacaaattctggaaaaaaccgggctatcgcttggcgtaaaagacgccagtctggccattgaagaaggcgagatatttgtcatcatgggattatccggttcgggtaaatccacaatggtacgccttctcaatcgcctgattgaacccacccgcgggcaagtgctgattgatggtgtggatattgcaaaaatatccgacgccgaactccgtgaggtgcgcagaaaaaagattgcgatggtcttccagtcctttgccttaatgccgcatatgaccgtgctggacaatactgcgttcggtatggaactggccggaattaatgccgaagaacgccgggaaaaggcccttgatgcactgcgtcaggtcgggctggaaaattatgcccacagctacccggatgaactctctggcgggatgcgtcaacgagtgggattagcccgcgcgttagcgattaatccggatatattattaatggacgaagccttctcggcgctcgatccattaattcgcaccgagatgcaggatgagctggtaaaattacaggcgaaacatcagcgcaccattgtctttatttcccacgatctcgatgaagctatgcgtattggtgaccgaattgccattatgcaaaatggtgaagtggtgcaggttggtacaccggatgaaattcttaataatccggcgaatgattatgtccgaaccttcttccgtggcgtcgatattagccaggtgttcagtgcgaaagatattgcccgtcgtacaccgaacggcttaattcgtaaaacccccggcttcggcccgcgttcggcactgaaattattgcaggatgaagatcgcgaatatggctacgtcatcgaacgcggtaataagtttgtcggcgctgtgtctatcgattcgcttaaagccgcgttaacgcagcagcaaggtcttgatgcggcgctgattgatgcgccgttagcggtcgatgcacaaacgcctcttagcgagttgctctctcatgtcggacaggcaccctgtgcggtgcccgtggtcgacgaggaccaacagtatgtcggcatcatttcgaaaggaatgctgctgcgcgctttagatcgtgagggggtaaataatggctgatcaaaataatccgtgggataccacgccagcggcggacagtgctgcacaatccgcagacgcctggggtacaccggcggctgcaccaaccgacggcggtggcgctgactggctgaccagtacgcctgcgccaaacgtcgagcattttaatattctcgatccgttccataaaacgctgatcccgctcgacagttgggtcactgaagggatcgactgggtcgttacccattttcgtcccgtctttcagggcgtgcgcgttccggttgattacatcctcaacggtttccagcaattgctgctgggtatgcccgcgccggtggcgattatcgttttcgctctcatcgcctggcagatttccggggtcggaatgggcgtggcgacgctggtttcgctaattgccatcggcgcaatcggtgcctggtcacaggcaatggttaccctggcgctggtgttaacagccctgctgttctgtatcgtcataggtttgccgttggggatctggctggcgagaagtccgcgagcggcgaaaattattcgtccactgcttgatgccatgcagaccacgcccgcgtttgtttatctggtgccaatcgtcatgctgtttggtatcggcaacgtgccaggcgtggtggtgacgatcatctttgcgctgccgccgattatccgtctgacgattctgggaattaaccaggttccggcggatctgattgaagcctcgcgctcattcggtgccagcccgcgccagatgctgttcaaagttcagttaccgctggcgatgccaaccattatggcgggcgttaaccagacgctgatgctggccctttctatggtggtcatcgcctcgatgattgccgtcggcgggctgggtcagatggtacttcgcggtatcggtcgtctggatatggggcttgccaccgttggcggcgtcgggattgtgatcctcgccattatcctcgaccgcctgacgcaggccgttgggcgcgactcacgcagtcgcggcaatcgtcgctggtacaccactggccctgtcggtctgctgacccgcccattcattaagtaactctgcacttgcccggtgacgccgggcatatcaccctgccaaaaaaaggaataacaatgcgacatagcgtactttttgcgacagcgtttgccacgcttatctctacacaaacttttgctgccgacctgccgggcaaaggcattactgttaatccagttcaaagcaccatcaccgaagaaaccttccagacactgctggtcagtcgtgcgctggagaaattaggttataccgtcaataaacccagcgaagtggattacaacgttggctacacctcgcttgcttccggcgatgcaaccttcaccgcagtgaactggacgccactgcatgacaacatgtacgaagctgccggtggcgataagaaattttatcgtgaaggagtatttgttaacggcgcggcacagggttacctgatcgataagaaaaccgccgaccagtataaaattaccaacatcgcgcaacttaaagatccgaagatcgccaaactgttcgataccaacggcgacggtaaagcggatttaaccggctgtaacccaggctggggctgcgaaggtgcgatcaaccaccagcttgccgcgtatggactgaccaataccgtgacgcataatcaggggaactacgcagcgatgatggctgacaccatcagtcgttacaaagagggtaagccggtgttttactacacctggacgccgtactgggtgagtaacgaactgaaaccggggaaagatgtggtctggttgcaggtgccgttctccgcactgccgggcgataaaaatgccgataccaaactgccgaatggcgcgaattacggcttcccggtcagtaccatgcatatcgttgccaacaaagcctgggccgagaaaaacccggcagcagcgaaactgtttgccattatgcagttaccagtggcagatattaacgcccagaacgccattatgcatgacggcaaagcctcagaaggcgatattcagggccacgttgatggttggatcaaagcccaccagcagcagttcgatggctgggtgaatgaagcgctggcagcgcagaagtaatttttattcgggcggataaggcgtttttgcctcatccgccgctctgtacacaatgcctgatgcgacgctggcgcgtcttatcatacctacaaaccacaccgcacatttcaacaatctatctttcatcccatattcatcaacatccgctattattgatttccagcttaatcatcacctgatgaacaaaaataatgactaaacctaatcatgagcttagcccggcgctgatcgtgctgatgtctatcgccaccggtctggcggtagccagtaactattacgcccagccattgctcgacaccatcgcgcgtaacttttccctttccgccagttcggcaggctttattgttaccgccgcgcagttgggctatgccgcaggtctgctgtttcttgttcccctcggtgatatgtttgaacgccgccgcctgattgtctcgatgaccttactggcagcaggcggcatgttaatcactgccagcagtcagtcgctggcgatgatgatcctcggtacagcattaaccggtttattttcagtcgtggcacaaattctggttccactggcagcgacgctggcttcaccggacaaacgcggcaaagtggttggcaccattatgagcggtctgctattggggatcttactcgcacggaccgttgccggattgctggcgaatctcggcggctggcgcaccgtcttttgggttgcttcgatgttaatggcactgatggcgctggcattatggcgtggtctgccacaaatgaaatcagaaacccacctcaactacccacagttgttgggttccgttttcagcatgtttatcagcaataagatcctgcgcacccgcgcgttgctgggctgcctgacctttgccaacttcagcattctctggacctcaatggcctttttgcttgccgctccaccttttaactacagcgatggtgtaattggtctgtttgggcttgcgggagctgccggagcgttgggcgctcgtccggcgggcggttttgccgataagggcaaatcgcaccacaccacaactttcggtctgctgctgctgttactttcatggctggcaatctggtttggtcacacttccgtactggcgctgattatcggcatcctggtgctggacctcaccgtgcagggcgtgcatatcactaaccagacggtaatttatcgaatacaccctgatgcgcgtaatcgcctgaccgcaggttacatgaccagctactttattggcggtgccgccggttcgctaatttcagcctcagcctggcaacatggcagttgggctggcgtgtgtctggctggcgcgacgattgccctggttaacttactggtctggtggcgaggttttcatcgtcaggaagccgcaaattaagcaatcagcaaccgttttcgtggctttacacttataagggtgttaagaagcccatcagtctgataaggttaagatattcattcagtctatttataatattaacaatcgttaagcgtacactctatggaaagccctactccacagcctgctcctggttcggcgaccttcatggaaggatgcaaagacagtttaccgattgttattagttatattccggtggcctttgcgttcggtctgaatgcgacccgtctgggattctctcctctcgaaagcgtttttttctcctgcatcatttatgcaggcgcgagccagttcgtcattaccgcgatgctggcagccgggagtagtttgtgggttgctgcactgaccgtcatggcaatggatgttcgccatgttttgtatggcccgtcactgcgtagccgtattattcagcgtctgcaaaaatcgaaaaccgccctgtgggcgtttggcctgacggatgaggtttttgccgccgcaaccgcaaaactggtacgcaataatcgccgctggagcgaaaactggatgatcggcattgccttcagttcatggtcatcgtgggtatttggtacggtaataggggcattctccggcagcggcttgctgcaaggttatcccgccgttgaagcagcattaggttttatgcttccggcactctttatgagtttcctgctcgcctctttccagcgcaaacaatctctttgcgttaccgcagcgttagttggtgcccttgcaggcgtaacgctattttctattcccgtcgccattctggcaggcattgtctgtggctgcctcactgcgttaatccaggcattctggcaaggagcgcccgatgagctatgaggttctgctgcttgggttactggttggcgcggcgaattattgcttccgctatctgccgctgcgcctgcgtgtgggtaatgcccgcccaaccaaacgtggcgcggtaggtattttgctcgacaccattggcatcgcctcgatatgcgctctgctggttgtctctaccgcaccagaagtgatgcacgatacacgccgtttcgtgcccacactggtcggcttcgcggtactgggtgccagtttctataaaacacgcagcattatcatcccaacactgcttagtgcgctggcctatgggctcgcctggaaagtgatggcgattatataacccacaagaatcatttttctaaaacaatacatttactttatttgtcactgtcgttactatatcggctgaaattaatgaggtcatacccaaatggatagttcgtttacgcccattgaacaaatgctaaaatttcgcgccagccgccacgaagattttccttatcaggagatccttctgacccgtctttgcatgcatatgcaaagcaagctgctggaaaaccgcaataaaatgctgaaggctcaggggattaacgagacgttgtttatggcgttgattacgctggagtctcaggaaaaccacagtattcagccttctgaattgagttgtgctcttggatcatcccgtaccaacgcgacgcgtattgccgatgaactggaaaaacgcggttggatcgaacgtcgtgaaagcgataacgatcgccgctgcctgcatctgcaattaacggaaaaaggtcacgagtttttgcgcgaggttttaccgccgcagcataactgcctgcatcaactctggtccgcgctcagcacaacagaaaaagaccagctcgagcaaatcacccgcaaattgctctcccgtctcgaccagatggaacaggacggtgtggttctcgaagcgatgagctaacgcgtcatctcgctcaaaaatccagatttataaaagaaaaaataaccggccagcatcgcaacatgctggcctttttggcaagcaggtcggctcagccgatgagttaagaagatcgtggagaacaatatgagcgcaaatgcggagactcaaaccccgcagcaaccggtaaagaagagcggcaaacgtaagcgtctgctcctccttctcaccttgctctttataattattgccgtagcgatagggatttattggtttttggtactgcgtcatttcgaagaaaccgatgacgcatacgtggcagggaatcagattcaaattatgtctcaggtgtctggcagcgtgacgaaagtctgggccgataacaccgattttgtaaaagaaggcgacgtgctggtcactctcgacccgacagatgctcgccaggcatttgaaaaagccaaaactgcactggcttccagcgttcgccaaacccaccagctgatgattaacagcaaacagttgcaggcgaatattgaggtgcaaaaaatcgccctcgcgaaagcacaaagcgactacaaccgccgtgtgccgctgggcaatgccaacctgattggtcgcgaagagctgcaacacgcccgcgacgccgtcaccagtgcccaggcgcaactggacgtcgctattcaacaatacaatgccaatcaggcgatgattctggggacgaaactggaagatcagcctgccgtgcaacaggctgccaccgaagtacgtaacgcctggctggcgctggagcgtacccgtattgtcagtccgatgaccggttatgtctcccgccgcgcggtacagcctggggcgcaaattagcccaacgacgccgctgatggcggtcgttccagccaccaatatgtgggtggatgccaactttaaagagacgcagattgccaatatgcgtatcggtcagccggtcaccatcaccaccgatatttacggcgatgatgtgaaatacaccggtaaagtggttggtctggatatgggcacaggtagcgcgttctcactgcttccggcgcaaaacgccaccggtaactggatcaaagtcgttcagcgtctgcctgtgcgtattgaactggaccagaaacagctggagcaatacccgctgcgtatcggtttatccacgctggtgagtgtcaataccactaaccgtgacggtcaggtactggcaaataaagtacgttccacaccggtcgcggtaagcaccgcgcgtgaaatcagcctggcacctgtcaataaactgatcgacgatatcgtaaaagctaacgctggctaatccagaggtgcgtgtgatgcaacagcaaaaaccgctggaaggcgcacaactggtcattatgacgattgcgctgtcactggcgacattcatgcaggtgctggactccaccattgctaacgtggcgatccccactatcgccgggaatctgggctcatcactcagtcagggaacgtgggtgatcacttctttcggggtggcgaatgccatctcgatcccgcttaccggctggctggcaaagcgcgtcggggaagtgaaattgttcctctggtcaaccatcgcctttgctattgcgtcgtgggcgtgtggtgtctccagcagcctgaatatgctgatcttcttccgcgtgattcaggggattgtcgccgggccgctgatcccgctttcacaaagtctattgctgaataactacccacctgccaaacgttctatcgcgctggcgttgtggtcgatgacggtgattgttgcgccaatttgcggcccgatcctcggcggttatatcagtgataattaccactggggctggatattcttcatcaacgtgccgattggcgtggcggtggtgttgatgacactgcaaactctgcgcggacgtgaaacccgcaccgaacggcggcggattgatgccgtggggctggcactgctggttattggtatcggcagcctgcagattatgctcgaccgcggtaaagagctggactggttctcatcacaggaaattatcatcctcaccgtggtggcggtggtggctatctgcttcctgattgtctgggagctgaccgacgataacccgatagtcgatctgtcgttgtttaagtcgcgcaacttcaccatcggctgcttgtgtatcagcctcgcgtatatgctctacttcggcgcgattgttctgctgccgcagttgttgcaggaggtctacggttacacggcgacgtgggcagggctggcctctgcgccggtagggattattccggtgatcctgtcgccgattatcggccgctttgcgcataaactggatatgcgccgactggtaaccttcagctttattatgtatgccgtctgcttctactggcgtgcctatacctttgaaccgggtatggattttggcgcgtcggcctggccacagtttatccagggcttcgcggtggcctgcttctttatgccgctgaccaccattacgctgtctggtctgccaccggaacgattggcggcggcgtcgagcctctccaactttacgcgaacgctggcggggtctatcggtacgtccataacgacgacgatgtggactaaccgcgagtcgatgcaccatgctcagttgaccgaatcggtgaacccgtataacccgaacgcccaggcgatgtacagtcaactggaagggcttggtatgacgcaacagcaggcatcaggctggattgcccagcagataaccaatcaggggctgattatttccgccaatgagatcttctggatgtcagccgggatattcctcgtcctgctggggctggtgtggtttgctaaaccgccatttggcgcaggtggcggcggaggtggtgcgcactaaggttgccaaagggagctgcggctccctttttatttgctcattctgcaaacggttgttttatacactcattcggtgtatcttttcgccgccccaaactcttccattcaccattaaccggttctgagcattcgctcaggttgttaattctctttttccttcgcccttgctttcgcgggtgatactcacatttttattttaaccccataactcgcaccctcgcgggcgtacatttattacacacaaaataatggattattatgaatacccaacgaaaatacgggagaacctggcattaccccttctctccaggcaccaccagcgatgaccgcattaacaccgattactggcaggatttacaggccatcacgcaattggtgcacacagaaaaactcgatggcgaaaataactgccttaaccgctacggcgtgtttgcccgctcccatgccacgcctacgcagtcggcatggacctataaaattcgccaacgctggcaactgctgaaaaacgatctcggcgacctggagttgtttggtgaaaatctctacgccgttcattccattgaataccgcgcgctggaacaggacttttacctgtttgccgttcgctgtggctgagctgggaagaggtgcagttttacgccgctctgtttgatttcccctgcgttcccgaaatctccggcccgcagccggggaatgatgaaaaaagctggcaacgtgattttctggcgctgaccaatgcgcgcggcacattcgatccctgggatacgcaaacctgtcaaccctgtacgctggaaggcattgtcagccgaaatcatgatgcgttttctgtcgctgacttttcgcataacgtcttcaagtatgtgcgcaaaaatcatgtcaaaaccactgtgcactggaaacgccactggcaacgggcgcggatggcccatgagttcgtttatggagaacagtcatgatttggcaacttaccgacgataaacgctggtcggcgctacgtcagcgttttagctgggttgaggagatgcatcacacgccacaagaccctgagcatcatggtgaaggcgacgtcggcgtacataccgaaatggtgcttaacgccctcattactctgccagaattccagcaactccccgctcaacagcaggaagttttatgggcggcagcgttattgcatgatgttgaaaagcgcagcactaccgtgcaggaaaacggacgtattcagtctcctggtcatgctcgtcggggcgaactgacggcccgacaaattttatggcgcgatatcccaacgccgttcgtgctgcgcgagcaaattgttgcactggtgcgtctgcatgggttaccgctatggttactggagcgcccggaaccggagcgtttgttgctcacggctgcaatgcgcatcgacacgcgtctgctcgctttgcttgctcgtgccgatctgcttggtcgccaaagcccggatcagcaatcaatgctggaacgcatcgatctgttcgagctgttttgccatgagcaacaatgctggggaaaaatgcgcccgttcgtttctgattccgcacgctggcattacctgacccatgagcaaagttctcctgattttgttccctgggaggctgaaccttttgaggtcattttgctgtgtggcttaccgggtatgggcaaagatcgctatatcaatgaacagtgccagggaatggacgttatcagccttgatgatatgcggcggcgaatcaatgccagtccggacgacaaaaccgccaccgggcgtattgtgcaacaggcaaaagaagaggcacgcgtttttttacgccagaaaaaaccgttcatctggaatgcaacgaacattacccgccagctgagtagccaactcatcaacctgtttacggcttacggcgcacgagtaaaaatcgtttatcttgaagtgccatgggcgcaatggaagcagcaaaatgccagacgcgagtatgcagttcctgaagcggtcgtgatgcggatggcctcaaggctggaagttcctcaacctgatgaagcacatagcgtggagtatcgggtgattgaaaggtaaaaaaaccgggcggtggtgtcacctgcccggcttcttttgttccactgactagatgtgcagttcctgcaacttctctttcggcagcgccagttcttcgttgctgttgatgcgcacgtcacgttccagaatgttacgcgcaatatcctgcgcttcctgcaacgagtgcatctggtaagtgccacactggtagacgttcagttccgggatctgattctgatcctgcactttcagcacgtcttccattgccgctttccaggcatcagcgacacgctgctcatctggcgtaccaatcagactcatataaaaaccggtgcggcagcccattggcgagatatcgataatctctacgccattaccgttaagatggttacgcataaaaccagcaaacaagtgctccagggtatggatccctctttctggcatcacttctttgttcggcacgcagaagcgcagatcgaacacggtgattgcgtcgccatgcggggtgttcattgttttcgccacccgaactgcaggcgcttccatccgggtatgatcgactgtgaagctatctaacaacggcatttagccacctccggtaatttttttaaaaattttctgaactctttcttcccaggcgagtctgagtatatgaaagacgcgcatttgttatcatcatccctgaattcagagatgaaattttggccactcacgagtggcctttttcttttctgtcaggcgtgtttttccagccacactgcaaacggttcggtatcagcggcttccatttcctgctgacggcgttcagacgcctcgcgctcggctacaaaatcctcttcgcgcagaatttccagcggctcttcacgcagcagattacggtacgcttcagcaaacgctttgcctgttccgccaataccagtatcaatcatagaccttaagatacgggcagagaaagtcagatcgggattatcgaagcaggcgaccagttcatcacacactttctgatacgcttcgccgccgttaatgctatccagcgtttgcgcgacgcgtttcagatcgcggaacagatctttacccacctgcggtaacgggaactgcgcagtttcgcagccgatacccagcgtcaggcccggtttgcgaccttcgaggatcacccggttccagttaacgcgtgtacaggcaagttcgctactgctcatttccggtgcatcagccagcgcacaccagaccataaacaggtcgaggaatcgcacctgttgttcatctacaccaatcggcgagaacgggttgatgtccagcgagcggacttcaatatattcaatgccgccacgtaacagcgcatcagaaggcgactcgccgctgcgggtaacgcgttttggacgaatcggcgcgtacagttcgttttcaatctgcagcacgttgctgttgatttgcagccgcttaccgtctttctcaataccaatcttcgcgtactcttccgatggcgttttgattgcctgtttaaggcccgccacgtactcgtagagatcattgaaggtgataccaagattgctttgcgatttattggtatagccgagatcgctcaaacgaagagaggtcgcatacggcaggtaatacataccgcactcggttttctcaaacggcagcgacgttggttttccttgcaagaaagaagaacaaatcgctggagacgcaccaaacagataaggaatgacccaaccgaaacgatagtaattgcggataacgcggaaatagcccgcagaaattttctctttggcatcagcgcccgagatatcaccgcacttcgcttgccagaatgccattggcaaagagaaattatagtgcacgccggaaatggtttgcatcagcgcgccgtagcgatttttcagcccttcacggtacagcgttttaaagcgaccggtgttagaagtgccgtactgtgccagttcgatgtcctgaccttctgcgatgtagcatggcatacttaacggccacatccgctcatcgcccatattgcgcgccgtatagcgatgcagatcgcgcataaaggtcagcatatgttcaatatcaccatccactggtgtaataaattccagcaatgcttccgcaaaatcggtagtaatccatttatgggtcagtgcagaacctaatgcttcaggatgacctgttgttgccagtgtgccatcagcattaacacgcaaagtttcgcgctccagcccacgctgtatcccctttaacgcctgaggatgtttttccagccaggccagcgcctgtgatacgtccgggatcaaattgacctcccgcctgtcaaaatcgttttaattagcataactgtaatggtgaccatatgtgcaggcctacaattagtgccaccacatcatgccctgaacggtagctgctgcaactgcaacatagcgtaacgctttaccaaggcacaaaaaaaagattaccggtccccacgagatgcgcatccatcccgctaacagacacagtaaatcgccaaccacgggcatccagcttaataatagcgtgactgcaccatagcgtttcagccagccggtagctttctcttgccagcgcgatgttttacgcaatggaaagaaacgcccaaggataacgttagttaaccctccaaggctattacccattgttgctgttaaaactaaaacccagggatgactcactccggaaagcaacattgccaccagcacgacttcggagttgccgggtaatagtgtagcgctgagaaaactactggcaaacaacgagaaaagcgataacgcttcactcacagcaagcgaacatccacggcgtccatgcctgctgcacgggccgcctgaataccgaaatcggcatcttcaaagaccacacactgcgtcggttgcacgcccatacgctgcgcgcacaacaaaaatgtgtctggcgcgggtttatggtgtttgacgtgatcggcagcgacgacggcgtcaaaataacggcgtaatcccaggtgtgccagcaatgcctcagcgatggcgctttcactccccgttcctacagccattgggcgacgaccatgccagcttttcaccacttcaacaagaggaagcggctcgacactatccagcagcatacttcttactgcttctgttttttcacgcgctaacgcatgcgggtcgagatcggcctgattcagctcaataatcgcctgagcaatacgccaggtgggcgagccattaagcgcaatcatcgcctgaacatcgtactgaagaccgtagtgccctaatacttcgcgccacgctttacggtgcgtaggctcggtatccaggatggtgccatccatatcaaaaattaaacctgcataacgctcgtacatggtcttctcgcaagtagaaaaatatgacgctactttagcgtaattgcttgattttgtcgctgatggcgaaggagaagaaaattcaggaaatggataaagtagttatttagaaatgagatatttttgaaggaaattttttggagaatatggtgcatccgggaggatgactcactggcgctcgcccttcgggccgctgctggcgcaacgttatcctccctggtgcctgcggttaataccgctacctcttcgataccttcattgctgaaggttacggagaatatggtgcatccgggaggattcgaacctccgaccgctcggttcgtagccgagtactctatccagctgagctacggatgcatcggaaaaatttattttactgctgatattgatatcgctactaaagccatatcaagtaagagatggtgcatccgggaggattcgaacctccgaccgctcggttcgtagccgagtactctatccagctgagctacggatgcatcgggaaatttattttactgctgatattgatatcgccactaaagccatatcaagtaagagatggtgcatccgggaggattcgaacctccgaccgctcggttcgtagccgagtactctatccagctgagctacggatgcatcgggaaacttactttactgcagattttttgataccgccactaaagtcgtatcaagtaagagatggtgcatccgggaggattcgaacctccgaccgctcggttcgtagccgagtactctatccagctgagctacggatgcaaatggcggtgaggcggggattcgaaccccggatgcagcttttgaccgcatactcccttagcaggggagcgccttcagcctctcggccacctcaccacacgcctcttacgagtgcttcgaagaacttgtttatcgctcatcgtcgctgcgtggcgcacatattactttctgagacttataagtcaaacaatttttcccacacttttatcgtttgcacacttcacgctcaattagtctgtaaaaacgtcaaaaagagtgttttatcaacagaaaaacggaggtctgacagatagcagtaatgcaaaaaaatggagacttaagttgaatgaacgggagtaaagcgaaaagacaatggagtgaaagagaaattttgagggtgcgtctcaccgataaagatgagacgcggaaagattagtaactggactgctgggatttttcagcctggatacgctggtagatctcttcacggtgaacagaaacttccttcggggcatttacgccaatacgtacctggttgccctttacccctaaaactgtcacggtgacctcatccccaatcatgagggtctcaccaactcgacgagtcagaatcagcattctttgctccttgaaagattaaaagagtcgggtctctctgtatcccggcattatccatcatataacgccaaaaagtaagcaatgacaaacacattacatctaagcagtcatggcattacattctgttaaacctaagtttagccgatatacacaacttcaacctgactttatcgttgtcgatagcgttaatgcgaatgccgtgaagcgagtccacggcattgcctgacgcttatattattgcaatttcgcgctgacccagcctttcacactggctaacgctgcaggtaaggccgcagcatccgtaccaccggcttgcgccatgtcaggacgtccaccacccttgccgcccacctgctgagcgaccataccaatcagttcccctgctttcacacgatctgtgacgtccttagatacgcctgcaatcagagaaaccttaccttcggctaccgttgccagcacgataattgtcgaccccagctgattttttaaatcgtcaaccatggtacgcaacattttcggctcaacaccgctaagctcgctaaccaacagcttaacaccattaacatcaattgccttactggaaagatttgcgctctcctgtgcggcagcttgttctttaagctgttgtaactctttttccagctgacgcgtacgttccagtactgaacgcactttatcagccagattattgctatcgcctttcagcagatgcgcgacttcgcttaagcgatcgctgtctgcatgaacggtggcgatagcgccttctccggttaccgcttcgatacgacgaacgcctgcagcagtacccgattcagagatgatgcggaacagaccaatatcaccagtgcggctggcgtgagtaccgccacacagctcggtggagaaatcgcccatgctcagcacgcgtacgcgctcatcatacttctcgccaaacagcgccatcgcacctttcgctttcgccgcttcgagatccatgatgttggtttcgatcggcaagttacggcgaatctgtgcgttcaccaggtcttcgaccgcacgaatctcttctggtttcatcgcttcgttgtgtgagaagtcgaagcgcagcactttgtcgttaaccagtgaacctttctgcgatacatgagtacccagaacctggcgcagcgcagcgtgcatcaggtgcgttgcggagtgattcagacgaatacgggcgcgacgagcctcatcaacatcagcctgcacagcgtcgcccactttcagagaacccgcagcaagtttaccgatgtgaccaatcgcctggccgtatttctgcgtatcttccaccgcgaaggagaagttagcgcctttcagttcgcctttatcaccaacctgaccgccggattccgcatagaatggcgtttgatccagcacgaccacagcttcctggcctgcattgatggcatcaaccgctttaccatcaacaaacagcgcggtcactttgccgttcagttccagatggtcatagcctttaaattcagatgcactgtcaacacggatcattgcgttgtaatcggcaccaaagccgctggcttcgcgcgcacgacgacgctgctcttccattgctgcttcaaaaccagcttcgtcaactttgatgttgcgctcacgacaaacatcagccgtcaggtcaaccgggaagccgtaggtgtcgtacaggcggaaagcagtttcaccatccagcgtatcaccagaaagttttgccagctcttcatccagcagcgccagaccgcgctccagagtacgggcaaactgctcttcttcagtcttcagcacctgctcaacctgcgcctgctggcgtttcaggtcttcacccgcagagcccataacgtcgatcagcggaccaaccagtttgtagaagaaggtttctttcgcgccgagcatattgccgtgacgcactgcgcgacgaatgatacgacgcagtacataaccacggttttcgttggacggcattacgccatccgcgatcaggaacgcacaagaacgaatgtggtcagcgattacgcgcagcgatttattgctcagatcggttgcgccagtgactttcgctaccgcctggatcaacgtgcggaacaggtcgatgtcatagttagagttaacgtgttgcagcaccgcagcaatacgctccagacccataccggtatctacagacggtttcggcagcggttccatcgtgccatcggcctggcggttgaactgcatgaagacgatgttccagatctcaatgtagcggtcgccgtcttcttccggacttcccggagggccgccccaaatgtggtcgccgtgatcgtagaagatttcggtgcacgggccgcacggaccagtgtcacccatctgccagaagttgtcagatgcgtatggcgcacctttgttatcgccgatgcgaataatacgttcgcgcgggatccctacttctttttcccagatttcgtaggcttcgtcgtcgctttcatagacggtaacccacagacgctctttcggcagggcaaaccatttttcgctggtcagcagttcccatgcaaactgaatggcatcgtgtttgaaatagtcgccgaagctgaagttgcccagcatttcgaagaaggtatgatgacgcgcggtgtaaccgacgttttccaggtcgttgtgtttaccacccgcacgcacgcagcgttgggaagtggtagcgcgggaataattacgcttgtcgagcccaaggaacacatccttgaactggttcatcccggcgttggtaaacaacaaagttgggtcgttatggggtaccagggagctgctggcaactacctgatgtcccttactatggaaaaagtcgagaaacgcctgacggatctcagcggtgctcttgctcataattatcctgaaatcaagctaacgaaatatcgctaccagccgttgcgtgtcgttaaccgcccggctggtaactgaaaagtgggaataagataagttttcttgactgggaagtaaaatcccgtatgcgttcagtcggcaaaatttcgccaaatatcctggatatcttccatcagatagccacgatagagcagaaaacgctggatcttaactttttctgaaaagacagttggcaaaggttcgccatattttcgcgtcgcctgatcgcgcgccagtgcgcaccagtcgatgtcacattcacgcatcgctttttctgtcgcttcgcgggaaatacctttctgattcagttcctgacgaatacgcgcaggtccataacctttgcggctacggctggcgataaagcgcgcaacaaatcggctgtcatcaagatagccatgttcatggcaccaggcaataacgcgctcgtaatcttctgccgtggcatcaatctcttccgggccatttttgcccataatcggtgccgcgagtttacgtcgcagttcttgctcactgtgatcgcgcaccgccagaatgcgtaccgcacgatccaacaggcgagcatatgccgggcgacgggatgttgattctgtcatggcatatccttacaacttaaaaaagcaaaagggccgcagatgcgacccttgtgtatcaaacaagacgattaaaaatcttcgttagtttctgctacgccttcgctgtcatctacagagaaatccggcgttgagttcgggttgctcagcagcaactcacgtactttcttctcgatctctttcgcggtttccgggttatctttcagccaggcagtcgcattcgctttaccctgaccgatcttctcacctttgtagctgtaccacgcgcctgctttctcgataagcttctctttcacgcccaggtcaaccagctcgccgtagaagttgataccttcgccgtagaggatctggaattcagcctgtttaaacggcgcagcgattttgttcttcaccactttcacgcgggtttcgctacccaccacgttttcgccctctttcaccgcgccgatacgacggatgtcgagacgaacagaggcgtagaatttcagcgcgttaccaccggtagtggtttccgggttaccgaacatcacaccaattttcatacggatctggttgatgaagatcagcagcgtgttggactgcttcaggttacccgccagcttacgcatcgcctggctcatcatacgtgccgcaaggcccatgtgagagtcgccgatttcgccttcgatttccgctttcggcgtcagtgccgccacggagtcaacgacgataacgtctactgcgccagaacgtgccagggcatcacagatttccagtgcctgctcgccggtatccggctgggagcacagcaggttgtcaatatcgacgcccagtttacgtgcgtagattgggtccagcgcgtgttcagcatcgataaacgcacaggttttaccttcgcgctgcgctgcggcgatcacctgcaacgtcagcgtggttttaccggaagattctggtccgtagatttcgacgatacggcccatcggcagaccacctgccccaagcgcgatatccagtgaaagcgaaccggtagagatggtttccacatccatggaacggtcttcacccaggcgcatgatggagcctttaccaaattgtttctcaatctggcccagtgctgccgccaacgctttctgtttgttttcgtcgatagccatttttactcctgtcatgccgggtaataccggatagtcaatatgttctgttgaagcaattatactgtatgctcatacagtatcaagtgttttgtagaaattgttgccacaaggtctgcaatgcatacgcagtagcctgacgacgcaccgcatcacggtcaccgctgaagcattcccgccgggtaatgccttcaccacgggcagtggcaaaagcaaaccagacggtgccgacaggcttctcttcactgccgccatccggcccggcgataccactaatagacacggcgtaatcagcacgagccgctttcagtgcgcctatcgccatttccaccacgacaggttcgctcaccgcgccatgctgcgccagcgtctcttcgcgtacaccgatcatttgcgcttttgcttcgttactgtaggtgacaaatccgcgttcaaaccaggcggaactgccggcaatatcggtaatcactttcgctacccaaccgccggtacaagactcagcagttgttacggttgcgccacgggctttcagcgcctgcccaacctgttcgcttaactgcatcagttcactgtcagtcatcacaacctctgtcagtcaaaaatttatgccggacaagataacactttcgtcaggaagatggtgttggcgttgcaattttacgaggaggattcagaaaaaagctgattagccagagggaagctcacgcccccctcttgcaaatagttactgcacgcgcgccagcgccacggcttgtcctaactgccagaccgccattgcgtaatgggtgctgtggttataacgggtaatggtgtagaagttcggcagaccgtaccagtactggtagccggtgccaacatccagacgcagcaggctggcttgttgatggttgcccagcggctgctgtggcgttaaacctgccgcggcaagctgcgaaatgctgtacctggttttgaagccatttggcaagcctggcgcctgaccgtttgccattaccgcgacctgatcgcctttcacccagccgtgcgctttgaaataattcgccacgctaccgatcgcatcaaccggatcccacaggttgatatgcccgtcgccgctgaaatctaccgcatattgtttgtaagacgacggcataaactgaccgtagcccatcgccccggcaaaggaacctttcagattgagcggatcgtcctgctcgtcgcgcgccatcagcaggaaggtttccagctcgccagaaaaatactccgcgcggcgtgggtagttaaatgacagcgttgccagcgcatcgaggatgcgagttttccccatcacgcgcccccagcgggtttcaacgccgataatcccgacgataatttccggcggtacaccatacacctgccacgcgcgattcaacgcatcttcatactgattccagaaaaccacaccgttctgcacgttgtccggcgtaataaattttttgcgataacgcagccatgcgccgttcggacctgatggcggtttcaccgatgtggttggtgcctggttatccatcagccgcagtaccgaatccagacgtttcgcctgggagagaatttcctgcaactgctgacgatcgaaaccgtgtttgttcaccattttgtcgatgaactgctgggcattcgggttattggcgaagtcaccgcccatctgcatcacattgtgctgcggctcaagcaggaagccgccagacggcgttccggtggtcgtttcagtctcagtaggttttggcttgctgctacaggcggcaagcaacataaaaaggggaagcaatgttacataacgacgcttgaacatgaggggtccatttaacagattcaaccaggggcaagtatggtaaagcatcccgccccgcacaaggaagcggtagtcactgcccgatacggactttacataactcaactcattctcctcactaccctctttatataaactttcaaaataaaatatttatctttcattttgcgatcaaaataacacttttaaatctttcaatctgattagattagattgccgtttggtaataaaacaataaatcctgaaggagagaacaatgatagaaaccattactcatggcgcagagtggttcatcgggctgttccagaaaggcggagaagtgtttaccgggatggtaaccggcattcttccgctgttaattagcctgctggttatcatgaacgcattgattaattttatcggtcagcatcgtattgaacgatttgctcaacgttgcgccggtaaccctgtttcccgttatctgctgctaccgtgcattggtacgtttgtcttttgtaacccgatgaccttaagtcttggtcgctttatgccggaaaagtacaaacccagctattacgcggcggcctcttatagctgccactcaatgaatggcctcttcccccatatcaaccctggcgaactgtttgtttatctcggcattgccagcggtctgacaacactgaatctgccacttggcccactggcggtgagctatctgctggttggtctggtcaccaacttcttccgcggctgggtaaccgatctgaccaccgccattttcgagaaaaagatgggcattcaacttgaacaaaaagttcgtctggcaggagcaacatcatgacacgcattcggatcgaaaaaggaacgggtggctggggcggcccgcttgagctggaagccacgccgggcaaaaaaatcgtctatatcaccgccggtacccggcctgcgattgttgacaaactggcacagcttactggctggcaagctatcgacggatttaaagaaggtgaacccgcggaggcggaaattggtgtcgcggtaatcgactgtggcggcacattacgctgcggcatctatccgaaacggcgtattcccaccattaatatccactcgacgggcaagtccggcccgctggcgcagtacattgtggaagatatttatgtctctggcgtaaaagaagaaaacatcactgtagtgagtgaggcgacaccacaaccctcttccgtgggccgtgactatgacaccagcaagaaaatcaccgaacaaagcgatggtttactggcgaaggtgggaatgggtatgggttccgccgttgccgtgttgtttcaatctggtcgtgacaccatcgacactgtattaaaaaccattctgccgtttatggcgttcgtctcggcgcttatcggaatcattatggcttctggccttggtgactggattgcccacggtcttgctccgctggcgagccatccactgggtctggtcatgctggcgctcatctgctccttcccgctgctttcacctttcctcggcccaggcgcagttatcgcacaggttatcggcgtattgattggcgtgcagattggtctcggcaatattccgccgcatctggctttacctgcactgtttgccatcaacgcgcaggcggcctgcgacttcatcccggtcggtttgtcgctggcggaagctcgtcaggacacggttcgcgtcggtgtcccttctgttctggtgagccgctttttaaccggcgcgccaactgtactgatcgcctggtttgtctccggttttatctatcaatagaggctgaaacatgaccgttatttatcagaccaccatcacccgtattggcgcgagtgccactgacgccctcagcgaccagatgctcatcacctttcgtgaaggcgcgcctgcggatctcgaagagtattgcttcattcattgccacggcgagttgaaaggtgcactccatcccggtttgcaattttctctcgggcggcatcgctatccggtgaccgccgttggcagcgtggcggaagacaaccttcgcgaactgggtcatgtcaccctgcgcttcgatggtttaagcgaagcggaatttccgggcactgtccatgtggcaggccctgtacccgacgatatcgcgccgggatcggttttgaagtttgaatctgttaaggagtaaaaaatgaatcaggttgccgttgtcatcggtggtgggcaaaccttaggcgcgttcctgtgccacggtctggctgccgaggggtatcgcgtggcggttgtcgatattcagagcgacaaagccgcaaatgtggcacaagaaattaacgccgaatatggtgaaggaacagcgtacggttttggtgctgacgccaccagcgagcaaagcgttctggcgctttctcgtggggtagatgaaatctttggtcgcgtggatttgctggtctacagcgccggaatagcaaaagcagcctttatcagcgacttccagctcggcgattttgaccgttcgctacaggtgaatctggtgggttatttcctgtgtgcccgtgaattttcgcgtttgatgatccgcgacgggattcagggtcgcattattcagatcaactcgaaatccggcaaagtgggcagcaaacacaactctggctacagcgccgcgaaatttggtggcgtcgggctgactcaatcactggcgctggatctggcggagtacggcattacggtgcattcgctgatgctcggtaacctgctgaaatcgcctatgttccagtcgctattgccacaatacgcgaccaagctgggtatcaaaccggagcaagtcgagcagtattacatcgataaagtaccgctcaaacgcggctgcgattatcaggatgtgctgaatatgctgctgttctacgccagtcctaaggcgtcgtactgcactggtcagtcgatcaatgtcaccggcggtcaggtgatgttctgatcaacagcggagatcttttaaggatctccgcgcgactaatagaatgcctgatgcgctacgcttatcaggcctacaggacttccgccactacattacggagaagttatggtatccgcactcatcaccgtcgccgttatcgcctggtgtgcgcaactggccttaggcggttggcaaatttctctttttaaccgtgccttcgacacgctatgccagcaagggagggttggcgtgggccgttccagcgggcgctttaaaccgcgggtcgtggtcgctattgcgctggacgatcagcagcgcatcgtcgacaccttgtttatgaaaggactgaccgtcttcgcccgaccgcaaaaaattcccgcaattaccggcatgcatgtgggtgatttacagcctgatgtgatctttccccatgatccactatcacagaatgctctatcattggcgcttaaactgaaacgtggataatttcgttgtgaatgttacttgcttgcgaagttatcattttgaaacctaaatcaggtaatcacgcccatgaaacctcgtcagcgtcaggccgccattctggagtatctacaaaagcagggtaaatgctcggttgaagaattggcgcaatactttgacaccacaggcacaaccattcgcaaagatctggtcattctggaacatgccggaaccgtcattcgtacttatggcggcgtggtgttgaacaaagaggaatccgatccgcctatcgatcataaaacgcttatcaacacccacaaaaaagagctgattgcagaagctgccgttggttttattcatgatggcgactcaataattcttgatgctggcagtaccgtgttgcagatggtgcctctgctatcgcgctttaataacatcacggtgatgaccaacagcctgcacatcgtcaatgcgctatccgaactggataacgaacaaactatcctgatgccaggcggaacatttcgcaaaaaatcggcctcatttcacgggcaactggcagagaatgccttcgagcatttcaccttcgataaattgtttatgggcaccgacggcatcgatctcaatgcgggcgtaaccacctttaacgaggtctataccgtcagtaaggcgatgtgtaatgccgcgcgcgaagtgattttgatggctgactcatcgaagtttggtcgtaaaagccccaacgtggtttgtagtcttgaaagcgtcgataagctgattaccgacgcaggtatcgatccagcgtttcgtcaggcgctggaagaaaaagggatcgacgtgatcataaccggagagagcaatgagtgaagcactactgaacgcgggacgtcagacgttaatgctggagttgcaggaagcaagccatttaccggaacgtctgggcgatgatttcgttcgcgccgccaatatcatcctgcactgcgaaggcaaagtggtggtttcgggaattggcaaatcgggccacattggtaagaaaatcgccgcaacgcttgccagcaccggcacaccggctttttttgtccatccggcagaagcactgcacggcgatctggggatgattgaaagccgcgatgtgatgctgtttatctcttattccggtggcgcgaaggaactggatctcattattccgcgtctggaagacaaatctatcgcgctgctggcaatgaccggaaaaccgacgtcaccgctgggcctggcggcgaaagcggtgctggatatctccgtagagcgcgaagcctgcccgatgcaccttgcgccgacctccagcaccgtgaataccctgatgatgggcgacgcgctggcgatggcggtcatgcaggcgcgcggatttaatgaagaagattttgcccgctcccacccagccggggcactgggcgctcgcttgctgaacaaagtgcatcatcttatgcgtcgtgacgatgccatcccgcaggtggcgttaaccgccagcgtgatggacgcgatgctggaacttagccgcaccggtttaggtctggtggcagtgtgcgatgatcaacgactggtgaaaggcgtctttaccgacggtgatttacgtcgctggctggttggcggcggcgcactcaccacgccagtcaatgaagcgatgacggtcggcggcaccacgttgcaatcgcaaagccgtgccatcgacgccaaagaaatcctgatgaaacgcaaaatcaccgccgcaccggtagtggatgaaaacggcaaactcaccggcgcaattaacctgcaggatttctatcaggccgggattatttaatccttcagccccagacgtttcgccagcctatgcaggttggcgacgtcggtttccagcatccgcgcacaggcggcccagttgtgatgattttgcgccagtgcctgacgaatggtttcacgctggaacgcttctgtcgcttcacgcaggttttgcttaacaacgggcaccgccgccacttctggcggcggcaacgtcacctcaggaaaagcaaaatgttgcgcctcaagaatcacttcatcgccgctgcgggttgctctcgccagcactaccgcccgatgaatagcatgttccagttcacgaacgttccccggaaaattgtagtgttgcagtaaatttcgcgctccggcacttaataccactcgggagagccccagccgcaaacgacactgctcgcagaaataccccgccagcagaatgacatcatcgccccgctcacgcagcggcggcactgaaagtggaaacacgctcaggcggtggaacaagtcagcgcgaaatcgccctgccagtacctcttcgcgtaagtcacggttagtcgccgccagcacgcgcacatcgacccgcaaactgcggtcatcgccaacgcgttgaatatcgccatactgcaacaccctcagcagcttggcctgcaatgccaacgacaactcgccgatctcatcgagaaacagcgtgccgttatccgccatttcaaacttcccgctgcggttactgatagcaccagtaaacgcccctttcacatgcccgaacaactcactttccgccacactttccggcagtgcggcacagttgagatagaccagcggattcaccgcccgtggcgaggcttcatgaatcgctttcgccaccagctccttaccggttcccgtctcaccgctaattaaaacgttgagatcggatgccgccacaatctcaatctcttttttcaattgcgtcatgcctggcgacagaccgatcatctgcgtctgtttcaccgcttcaaacggcgcggcttcgcctggcagcatattctggctttccagttgttcaatcagtaacgcattgcttaacgctcccgccgccagcgcagcaatcaggcgtaactcttcgtcgctgaaaacatcgaactgatcgggctgcatcccgtcgagcgtcaaggcaccgatcaggttttgcccggcaaacaacggcaaaccaacgcaggcgtgaaccttcagactctcctgccctggaatcaaaccgtcataaggatcgggcaattcgctgtctgcgggaaagcgcaccacatcacccgcgcgggcaatcgcttccagccgtggatgcccttccagcgcaaagcgtctaccgagtacatccttcgccagcccgtcgatggcaagcggaataaactgccgcgagtcgtaacgtagcaacgcagacgcatcgcactccagcacctgacgcagcgtggtgatcaggcgttgaaaacgatcctgatgaccaatcccacgctgcaattcgatggcgatattcgccagcacatcaacggaaaaactcatctttgcctcactgtcaatttgactatagatattgtcatatcgaccatttgattgatagtcattttgactactcattaatgagcataattttatttatagagtaaaaacaattagataaaaaactggcacgcaatctgcaatcagcaagacatctttttagaacacgctgaataaattgaggttgctatgtctattgtggtgaaaaataacattcattgggttggtcaacgtgactgggaagtgcgtgattttcacggtacagaatataaaacgctgcgcggcagcagctacaacagctacctcatccgcgaagaaaaaaacgtgctgatcgacaccgtcgaccataaattcagccgcgaatttgtgcagaacctgcgtaatgaaatcgatctggcagatatcgattacatcgtaattaaccatgctgaagaggaccacgccggggcgctgaccgaactgatggcgcaaattcccgatacgccgatctactgtacagccaacgctatcgactcgataaatggtcatcaccatcatccggagtggaattttaatgtggtgaaaactggcgacacgctggatatcggcaacggcaaacagctcatttttgtcgaaacgccaatgctgcactggccggacagcatgatgacttacctgacaggcgacgcggtgctgttcagtaacgatgctttcggtcagcactactgcgacgagcatctgttcaacgatgaagtggatcagactgagcttttcgagcagtgccagcgttactacgccaatatcctgacgccgttcagccgcctggtaacgccgaaaattaccgagatcctgggctttaacttgccagtcgatatgatagcgacctctcacggcgtggtatggcgcgataacccgacgcaaattgtcgagctgtacctgaaatgggcggcggattatcaggaagacagaatcaccattttctacgacaccatgtcgaataacacccgcatgatggctgacgctatcgcccaagggattgcggaaaccgacccacgcgtggcggtgaaaattttcaacgtcgcccgaagcgataaaaacgaaatcctgaccaatgtcttccgctcaaaaggcgtactggtcggcacttctacgatgaataatgtgatgatgccgaaaatcgccgggctggtggaggagatgaccggattacgcttccgtaacaaacgcgccagcgctttcggctctcacggctggagcggcggtgcggtggatcgtctttccacgcgcctgcaggatgcgggtttcgaaatgtcgcttagcctgaaagccaaatggcgaccagaccaggacgctctggagttatgtcgtgaacacggtcgcgaaatcgcccgtcagtgggcgctcgcgccgctgccgcagagcacggtgaatacggtggttaaagaagaaacctctgccgccacgacggctgacctcggcccacggatgcaatgcagcgtctgccagtggatttacgatccggcaaaaggcgagccaatgcaggacgttgcgccaggaacgccgtggagtgaagtcccggataacttcctgtgcccggaatgctctctcggcaaagacgtctttgacgaactggcatcggaggcaaaatgagcaacggcattgtgatcattggttcgggcttcgccgcccgccaactggtgaaaaatattcgcaaacaggacgccagtattccattaaccctgattgccgccgacagcatggatgagtacaacaaacctgacctcagccatgttatcagtcaggggcaacgtgccgacgaccttacccgccagacggcaggtgaatttgccgagcagtttaatctgcgcctgtttccgcacacctgggtaacggatatcgatgccgaagcccatgtggtgaaaagtcagaataatcagtggcaatacgacaagttagtgctggcaaccggtgccagcgcctttgtcccgccagtgcccgggcgtgagttaatgctgacgttaaatagtcagcaagagtatcgcgcctgtgaaacgcaactgcgggatgcccgacgcgtgttgattgtcggcggtggtttgattggtagtgaactggcgatggatttttgtcgggcaggcaaagcggtcacgctaatcgacaacgctgccagtattctggcgtcgttaatgccaacggaagtcagcagccgcttgcagcatcggttgacggagatgggcgttcatctgctgttgaaatctcagttgcagggactagaaaaaacagattctggcattctggcaacgctggaccgccagcgctgcatcgaagtggatgcggtaattgccgccaccggactgcgcccggaaaccgccctggcacgacgcgccgggctgacgattaatcgcggcgtttgcgtcgatagttatctgcaaaccagtaatgccgatatttatgcgctgggcgattgcgcggaaattaacggtcaggtattgccgttcctccagccgattcaacttagcgcgatggtgctggcaaaaaatcttctcggcaataacacgccgctgaaactcccggcgatgctggtgaaaatcaaaacgccggaattaccgctgcatctggcaggcgaaacccagcgtcaggatttacgctggcaaattaataccgaacgccagggaatggtggcacgcggcgttgacgatgctgaccagcttcgcgcctttgtggtcagtgaggatcggatgaaagaggcatttggattgttgaaaacgttgtcgatgtaggcgagctacagtgccccaaatgtcggatgcggcgctgacgcgtcttatccgacctacagggaacacatgtgttgatcacataatacgtttatgtcgcatcctgcactgtcccaaaatgtcggatgcgacgctggcgcgtcttatccgacctgcggggatgaatatgtaggccggataaggcgtttacgccgcatccggcaatggtgtccaaatgcagcacgttttatccgttctggacttcccctgccaaccaacgcgccgcaacaataaccccctgccccagagacaacccgccatcgcccgcaggtaaactctgtggaaagagcaatgtgaaatcagcgagataatgcgccagacgtgcacgcagcaaacggttatgaataactccgccgctaaataccagcgtagtgataccccgcatcgtggcctgctcacgcatcaacgcggcaaaaccctgcgccagcgcatcatgaaacgcccacgcgcgttgattaaccggagcctgccagctcagccactgctgccagaaagtggcgagatccagttgattgtccaccagcggcatcgtcaccggatgcgtcactctgtggcacggagctgcgagtgcctccagagcacaagccgcttcaccttcataacttaacgtggctggcgcacagcccagcgccgccgctacggcatcgaacaaacgtccacacgacgatgccagcggcgcgttaattccacgctcaatagcccgcgccagcacgctccagttttgctgttgcacacttgccgtttcagagtaattctgccactccggcacaaagcgcaggcactgcgccagcaggtttcgccacggctgcttcgcagccaaatcgccccccggaagcgccaccgcgggcaagccgcccaggtgctggcattcacgatagttcacccgcaggcactcgcccccccataaagcgccgttctcccccataccaataccgtcgagcgtcaacgcaatgacatctccgccatccagaggccagaggtgttctgccagacacgccgctgcgtgggcatgatgatgcagtaccgtttgcgtcggcagattcatttcgcgcgcccactggctggagacatagcccggatgcgcgtcatgcacaacgtattgcggagtgaaatcgtagatgttttgcatcaggcgtaacgcttcgcgccactgcatctggatgccatcgtcacttaaatcgcccagatgctgactcaacaccgcttgttcgccgcgcaccaggctgaaggtgtttttcagatccgcaccgagacacagcacagggcggnnnnnnnnnnnnnnnnnnnnnnnnnnnnnnnnnnnnnnnnnnnnnnnnnnnnnnnnnnnatgcagtgcagcgtgtgccagtggatttacgatccggcgaaaggcgaaccgttgcaggacgttgcaccgggtacgccatggagcgaagttccggacaacttcctgtgcccggaatgctcactaggtaaagacgtcttcgacgtactggcaacggaggcaaaatgagtcacggcattgtcatcattggttcgggcttcgccgcccgccagttagtcaaaaatatccgtaagcaggatgcgaatgttccgctgaccttgattgccgcggacagcatggatgagtacaacaagcccgatctcagccacgttatcagtcagtcacagcgtgcagacgacctcacccgccagtcggcgggggagtttgccgaacagtttaatttgcgcctgtttccacatacctgggtaaccgacatcgacgccgatgcccacgtagtgaaaagtcaggacaagcagtggcagtacgacaagctggtgctggcgacgggcgcttcagcctttgtaccgccggttaccggacgtgagttaatgctcacgttgaacagccaacaagagtatcgcgcttgtgaaacgcaattgcgtgacgcccagcgggtgctgattgtcggcggcggcttgattggtagtgaactggcgatggatttttgtcgtgccggtaaagcggtaacgcttatcgacaacgccgccagcattctggcttcgctgatgccgccagaagtcagcagtcgcttacagcatcgtctgaccgatatgggcgtacacctgctgctgaaatcacagcttcagagcctggagaaaaccagcaccggtattcgcgccacgctcgatcgtagccgcaacgtagaagtcgatgcggtgattgccgccaccggactgcgaccggaaaccgcactggcgcgtcgcgccggattgaacatcaatcgtggcgtctgcgtcgacagctacctgcaaaccagccacccggacatttatgctctcggcgactgtgcggagattaacggtcaggtgctcccgttcctgcagccgattcagctgagcgccatgtatctggcgaaaaacctgctcggcggcaatgcgccattgaaactgccagccatgctggtaaaagtcaaaacgccagaactgcctttacatttggccggggaaacccagcgnnnnnnnnnnnnnnnnnnnnnnnnnnnnnnnnnnnnnnnnnnnnnnnnnnnnnnnnnnnnnnnnnnnnnnnnnnnnnnnnnnnnnnnnnnnnnnnnnnnnnnnnnnnnnnnnnnnnnnnnnnnnnnnnnnnnnnnnnnnnnnnnnnnnnnnnnnnnnnnnnnnnnnnnnnnnnnnnnnnnnnnnnnnnnnnnnnnnnnnnnnnnnnnnnnnnnnnnnnnnnnnnnnnnnnnnnnnnnnnnnnnnnnnnnnnnnnnnnnnnnnnnnnnnnnnnnnnnnnnnnnnnnnnnnnnnnnnnnnnnnnnnnnnnnnnnnnnnnnnnnnnnnnnnnnnnnnnnnnnnnnnnnnnnnnnnnnnnnnnnnnnnnnnnnnnnnnnnnnnnnnnnnnnnnnnnnnnnnnnnnnnnnnnnnnnnnnnnnnnnnnnnnnnnnnnnnnnnnnnnnnnnnnnnnnnnnnnnnnnnnnnnnnnnnnnnnnnnnnnnnnnnnnnnnnnnnnnnnnnnnnnnnnnnnnnnnnnnnnnnnnnnnnnnnnnnnnnnnnnnnnnnnnnnnnnnnnnnnnnnnnnnnnnnnnnnnnnnnnnnnnnnnnnnnnnnnnnnnnnnnnnnnnnnnnnnnnnnnnnnnnnnnnnnnnnnnnnnnnnnnnnnnnnnnnnnnnnnnnnnnnnnnnnnnnnnnnnnnnnnnnnnnnnnnnnnnnnnnnnnnnnnnnnnnnnnnnnnnnnnnnnnnnnnnnnnnnnnnnnnnnnnnnnnnnnnnnnnnnnnnnnnnnnnnnnnnnnnnnnnnnnnnnnnnnnnnnnnnnnnnnnnnnnnnnnnnnnnnnnnnnnnnnnnnnnnnnnnnnnnnnnnnnnnnnnnnnnnnnnnnnnnnnnnnnnnnnnnnnnnnnnnnnnnnnnnnnnnnnnnnnnnnnnnnnnnnnnnnnnnnnnnnnnnnnnnnnnnnnnnnnnnnnnnnnnnnnnnnnnnnnnnnnnnnnnnnnnnnnnnnnnnnnnnnnnnnnnnnnnnnnnnnnnnnnnnnnnnnnnnnnnnnnnnnnnnnnnnnnnnnnnnnnnnnnnnnnnnnnnnnnnnnnnnnnnnnnnnnnnnnnnnnnnnnnnnnnnnnnnnnnnnnnnnnnnnnnnnnnnnnnnnnnnnnnnnnnnnnnnnnnnnnnnnnnnnnnnnnnnnnnnnnnnnnnnnnnnnnnnnnnnnnnnnnnnnnnnnnnnnnnnnnnnnnnnnnnnnnnnnnnnnnnnnnnnnnnnnnnnnnnnnnnnnnnnnnnnnnnnnnnnnnnnnnnnnnnnnnnnnnnnnnnnnnnnnnnnnnnnnnnnnnnnnnnnnnnnnnnnnnnnnnnnnnnnnnnnnnnnnnnnnnnnnnnnnnnnnnnnnnnnnnnnnnnnnnnnnnnnnnnnnnnnnnnnnnnnnnnnnnnnnnnnnnnnnnnnnnnnnnnnnnnnnnnnnnnnncnggncngcaaaaggcgagccaatgcaggacgttgcgccaggaacgccgtggagtgaagtcccggataacttcctgtgcccggaatgctctctcggcaaagacgtctttgacgaactggcatcggaggcaaaatgagcaacggcattgtgatcattggttcgggcttcgccgcccgccaactggtgaaaaatattcgcaaacaggacgccagtattccattaaccctgattgccgccgacagcatggatgagtacaacaaacctgacctcagccatgttatcagtcaggggcaacgtgccgacgaccttacccgccagacggcaggtgaatttgccgagcagtttaatctgcgcctgtttccgcacacctgggtaacggatatcgatgccgaagcccatgtggtgaaaagtcagaataatcagtggcaatacgacaagttagtgctggcaaccggtgccagcgcctttgtcccgccagtgcccgggcgtgagttaatgctgacgttaaatagtcagcaagagtatcgcgcctgtgaaacgcaactgcgggatgcccgacgcgtgttgattgtcggcggtggtttgattggtagtgaactggcgatggatttttgtcgggcaggcaaagcggtcacgctaatcgacaacgctgccagtattctggcgtcgttaatgccaacggaagtcagcagccgcttgcagcatcggttgacggagatgggcgttcatctgctgttgaaatctcagttgcagggactagaaaaaacagattctggcattctggcaacgctggaccgccagcgctgcatcgaagtggatgcggtaattgccgccaccggactgcgcccggaaaccgccctggcacgacgcgccgggctgacgattaatcgcggcgtttgcgtcgatagttatctgcaaaccagtaatgccgatatttatgcgctgggcgattgcgcggaaattaacggtcaggtattgccgttcctccagccgattcaacttagcgcgatggtgctggcaaaaaatcttctcggcaataacacgccgctgaaactcccggcgatgctggtgaaaatcaaaacgccggaattaccgctgcatctggcaggcgaaacccagcgtcaggatttacgctggcaaattaataccgaacgccagggaatggtggcacgcggcgttgacgatgctgaccagcttcgcgcctttgtggtcagtgaggatcggatgaaagaggcatttggattgttgaaaacgttgtcgatgtaggcgagctacagtgccccaaatgtcggatgcggcgctgacgcgtcttatccgacctacagggaacacatgtgttgatcacataatacgtttatgtcgcatcctgcactgtcccaaaatgtcggatgcgacgctggcgcgtcttatccgacctgcggggatgaatatgtaggccggataaggcgtttacgccgcatccggcaatggtgtccaaatgcagcacgttttatccgttctggacttcccctgccaaccaacgcgccgcaacaataaccccctgccccagagacaacccgccatcgcccgcaggtaaactctgtggaaagagcaatgtgaaatcagcgagataatgcgccagacgtgcacgcagcaaacggttatgaataactccgccgctaaataccagcgtagtgataccccgcatcgtggcctgctcacgcatcaacgcggcaaaaccctgcgccagcgcatcatgaaacgcccacgcgcgttgattaaccggagcctgccagctcagccactgctgccagaaagtggcgagatccagttgattgtccaccagcggcatcgtcaccggatgcgtcactctgtggcacggagctgcgagtgcctccagagcacaagccgcttcaccttcataacttaacgtggctggcgcacagcccagcgccgccgctacggcatcgaacaaacgtccacacgacgatgccagcggcgcgttaattccacgctcaatagcccgcgccagcacgctccagttttgctgttgcacacttgccgtttcagagtaattctgccactccggcacaaagcgcaggcactgcgccagcaggtttcgccacggctgcttcgcagccaaatcgccccccggaagcgccaccgcgggcaagccgcccaggtgctggcattcacgatagttcacccgcaggcactcgcccccccataaagcgccgttctcccccataccaataccgtcgagcgtcaacgcaatgacatctccgccatccagaggccagaggtgttctgccagacacgccgctgcgtgggcatgatgatgcagtaccgtttgcgtcggcagattcatttcgcgcgcccactggctggagacatagcccggatgcgcgtcatgcacaacgtattgcggagtgaaatcgtagatgttttgcatcaggcgtaacgcttcgcgccactgcatctggatgccatcgtcacttaaatcgcccagatgctgactcaacaccgcttgttcgccgcgcaccaggctgaaggtgtttttcagatccgcaccgagacacagcacaggcggaacatttttaaagcccggaggcaaagccagcgcatccggcacatacccccgcgaacggcgcagcatttcgccgctttcgcgcaccaccgaatcatccatccgctgcacgatgtcgcggttatgtatcaagaatccgtcggcaatgccctgcaaatccgccagcgcctgttcgttgctgatagccggtggtttaccgctcaggttgccggaggtcatcaccagcgggcattgcagttcctgtaacagcaaatgctggagcgggttcgcaggcaacattaccccgacttcgttaaggccaggggcgatatcatcacaaagctcaggtacatattttttatccaccagcacaatcggcgcggcgggcgtggtaagcaactggcgcgcagcgtctggtaaatcgtcagccactggcaacatgaccgccagcggtttcgccgggcgatgtttgcgcgcccgaagtgtcgccaccgcgttactgttacgtgcatcgcaggcaagatgaaatccgccaatccctttgatggcgacaatgttgcccatttttaactgtgcgatagctgcctgtaatgccgcctcttgttctgcatgttcaccatgacttacccattcaagatgggggccacactccgggcaggccaccggctgggcgtggaagcgacgatcgagcgggtcacagtactctttgtcacaagccggacacagcggaaacgccgccatcacggtaaacgggcggtcgtaaggcatggcgcgaataatggtgaaacgcgggccacagtgggtacagttgataaacggataacgccagcgtcgttcgcctggggtattcatttcggcaaggcaagcagggcaagtggcggcatcgggaacaatttgcgtattcatgacgccacccgcgctctggcggatggtgaactcagtgggcagttgtgaccagataaacggctcacgctcgacgctatcaatacgcgccagtggcgggcagtgctgatgcaattgaacaagaaacgtttccggatcttccagcagccggacttctacgccatcgccgtcattacagacatcgccgtgaagatttaattgctgtgccagttgccagacaaacggacgaaaaccgacgccctgcactttgccacgaatacgcagttggacaccgcaagatgtgttttttgccattgagttattcccgccatcatgaattgcgtaacccgccctgccggacacgacagcgtcgcatccggcagtcacaggtcggcgataccgcccgcttcgtattctacgaatatttccgggaattcctttgataccagaacagttctgtaagatttttagaacatcagcgccgtgcggcggcgtttttctgcgctcagttgttcaagtttattacgatcgacacaaatcagcgcatgggtcgggcaagccgccatacacgccgggccgtcttcacgatggttgcacaggtcgcatttattggcttcggctttgtcagcccgtacattcagccctgcgccgctgttgcgaatcaccggacgcaccaccacttccatcgcaccatacgggcaagccacaacgcaggttttgcaaccaatacaacgttcctgcatgacatgaacaaaccctttatcacggctgatagcaccattcgggcagacgttagcgcacggtgcatcttcacactgacggcaaactgtcgccgtggaaatgttcacacctttaatgacatggatacgcggtaaaaatgtttccggggtcagcgatgcacagtcctgattttcctgatgagaaaccacgcacgctacttcacaggtacggcaaccaatacatttactcgcgtcagcaatgatgaaacggttcatcaaattctccagcaatgacagttaatgcgccgatacattcacaaatcatgccagtttttaatttactgttatttaaggaaattaaattctgtactacaggaaaaacgatgtcatcgacactagtgacgatgacatgtgatgacagtatttatcgttgccagtccacatctgggtacttttttccgacaagtcgttctggtggtataaaaaagtaattgccagtaacggggaggatttaagggaagcaaccgtgccggatacggcgtgaacaatgaccactttgtcagctatccatatgattgtattttgaggttcatcgcagattagcgatgaacctttattaaataatacaattccgactgaaataacaggtaaggatacaaaatgggttcatggggaatggaggctctcgaaagcgacgaagggctggatttgattaattgggtagaggaacaactgcaagatgattcgacctttgatgccgagtcaattgttcaacgcttaagccagcatgaagatttgttcggatttcagggagatgaagaatttctctacgataataatgttatcggtctcgtcgaacttatcattcaaaaagcagccggggaaaaaatcacatcgagtaaacaaattgatcaactcgacagttatcggctcacgtcgattttcagcaaaaaactctagggccgtttacaaacaatcgacgacacacatgagtggataatgctttttgaggggcgagcacgcgaaaaggcaaaagcatatctgattgagattactgataaattaagagtagtaaagacaacagcctgaatgacaaacaagggcgcgcaaaattaagaatctgcgccctttcaaagcccgacaggcgtagcgcatcaggcgatttagcgtctgccatcagtcaaagaaaccattccggcttaacgccaaatcgggctgaaagtgccttaatgtggggtatcgtcaaggatcgttgtccagacaagatctggctgaccagggatttagagccgatttcgttcttcaaatctgcataggtcagattatgttgatcaatcagcgtgcgaagtaacgccacaccaacaggcattgccgcaacggctttgtcgaactctgcaaacttttcgttgttgttttcatattctgcaatgcggctcgccagaaagtcgataagtggattggtgtcatcttcttcaatcaaatattcgaccagttccagtgcttcacgataatcatcttctgagtcactgcctcccagaaaggggactgcattgaccagttctcttgttgctttaacagcgcgtgcagcattagcagtcattctttgttctctctgtagtaacgtgtcagtttgtcatactctgcgtgattcgtgatgtgcttcacaaagaaccgcttattaacaaagtttatgtaggcaataaccctaagattgttcccgccgacatccagaacgtaccatttgttgcgatatttaaaattgtcgaggttgggaaaagccgttcgcatttcttctggcgtagaaaaatccgtttccttaataacccgatacaatgagtgtagagccagagcgtcgttaggatatttgcgcgcacactcttcaaatggcgctttagaaatgatgtgcatttttaagttttaacttccttatagtaagtaaacagccacatctgcgagttctatccttatatgttcggaacactatagcttatcaaatccaagttcacaatatgtaaacacttgcgcacgatataattactacaaaaatcctcatagccactctgcaaaaagtcagttctgattcaccccatcaagcacatcaccctttattaaacaacgctgtgtcagcgccagatctttcgtttgcgggttacgtccggcgacaggtttaatgacgagtttacggttggaggtataggtaaaacgcgtgagtgcggggtagcttaacttgccaaaccagccgtgaacgcgctgccatttggcctcttttacctgatacaaactggttatccagtaaccggaatcaaactgcatatccagcaattgcgtgtgaccattgccttgtaaatcaagcaaatcatcaacgccagtttcgtttgcggtgtaaaaaccatcgacctggaaaacacacgggcgaccttgctgattaaaggtcatcaggatcaaaaacgaggaaggcgccagcccgtttcccgaaacacctcgccagataaccaaatcctgaatgccattacgatcgaggtcagcacggtaaaattgcgcattacccgccatattttgcagcacacccacaggcacaaaccaggatttaccggcacggtccttagcggttaatcgccagtaatcctcttcatttggcatcttctcaagcgttacgcctgcaatgcccacttttctaaaatgccaggtttgctcggcatcataaggcagggttaagagaggtttcagcgcccgcttttgcgcgtattcgctgtcactcatcggtagatattcggtaaagctggtagcctgcgcaggcagcactaagctcaataaaaaagcgcacatccctgtcctgatgttcaattccctgaattccttactgaaaaactactcttcttccgccgctaactgcgcgaagccgccatttccttcccagccttccagccgctgatacaccgtttccaccgcatctttaatctgctgagtcatcgggtagtaaaagccgacgatatccggctggatgccaaggaaaatcacttcgccaatatcttctttcaactggtcgataagatagttcagcggcatgttatgggtagtcatcataaacatctcggcgatgtcagccgggtcgatgatgcggatctcgccagggtttagccccatatccgtggcgtcgacaataagcagccgtgtcgggcgcagttcgcgaatagcgacaatgtcgttttccggtgcgctaccgccgtcaatcactacccagttacctttcggcgcggcagcgcacttttccgccagtagcgggcctgcgccatcatcgcccatcatgctattgccaacacagagtaaaacgtcagtcacgcagtctcctcaccatcaaatagatggcgttttcctgatgaatatcatgcagcatacttaacagcattgtactccattccttctgctgcgaagtttgcgctgcccgggctttatcgaatgcgttggccagcatcggcacatggttaatgtcgatgacgatctcaccatatttcggcacgccttccattttgcggcgggcttcgctgcccgcctccagagtggcaatccatgccagatattcatcccacgggcaggtaagcgccgcttccaggcaatcgataaccccaaggtggtgaccaatcgccaggctgtaatagaccacctgctgcgcctcggcgggcgtagcatcgttctcatcaatgaatttacggctcagttgactgaacaccaccttttcactcatcggatacgcgcctcttcaacaacatgattcagatggctgacaatctcgttcagacgcggatcgttttccgcttccagccaacgtgcaacctgttcttcgccctgccctaactgtgtcaggaagtcatcggcaatctgacgaccgtaacgataacccgccagtcggcgtgcttcgcgatccactttcacgcgcagcggctgcaccatatcgccatgcagaatctccgccggttgttcatcctgctcacccggcccacgggcgtgaattttctgctccagcaggccgagcgccatcgcaaagccgtacagcgtggcggcaggcgttggcgggcaccccggaatgtagacatccaccgggacgattttatccgtaccgccccacacgcagtagagatcgtggaagatcccgccgctgttaccgcaggcaccgtaggagatacagattttcgggtccggcgcggactgccacgcacgcagcgcaggggatcgcattgcacgggtgaccgcgccggtaaacagtaaaatatccgcatgacgcggtgacggaacaactttaatgccgaagcgttctgcatcgaacagcggcgaaagcgtggcgaaaatttcgatttcgcaaccgttacagccgccgcagtccacgcgataaacgtaggcagaacgtttgatttttttcagtaacgacgccttcatgctggcgatggattcatccaccgtcatcgggaccggaatgccgttggcgtcacgggggcctaataaattgctcatcagatggcctctttcatatggcgagtcagttcaatacggtcggacggcaccaggcatttctggcgcttacattccgggcaagtctcaaagctttcgcggtggttttccgcgcggctgtcgccgttgtgcttaagcagcgcaatggcgtagtcgatctctttctggacggcgaaaggacgattgcagacgcggcagttgcacagcgcgaagcgggactgttgcaggaagtcttctttcttccacaccgccagttcgtattcttgcgacagtttgatcgccgctgtcgggcagacttcttcgcagcgcccacagaagatgcagcgcccaaggtcaaactgccacgccagctcaccagtggcgaggtcggtttcaaccgttaaggcgtttgacgggcaggcattgacgcaagccgcacagccaatgcactgctgcgggttctgctctggcttaccacggaagtttttatcaaccgcaatcggctccagcggataagacgaagtcgccgtgccggttttgatgacttttttgataaaggtaaacatggcgattccttatttcagcggcgagtttttacgctcaatgctgtaacgctcgagttctttgtacggcaccactttgctcttcttcttacgtacatcgaccacggtcatgcggtcggtacaggagtagcaagggtccaggctaccgataatcaacggcgcatcggaaacggtgttaccgcgcagcatgtagcgcagggtcggccagttcgcgtaggtcgccgcacggcagcgccagcggtacagcttctggttgtcgccggtcatgctccagtggatatcgtcgccgcgcggcgcttcggcaaagcccagcgcgaaacggtgcggaatgtaggtaaagccttccaccatcagcgggccgcccggcaggttatccagaccgtaatcgatcatattcagcgcggtatagacttcgttgatacgcactttcagacgggaaataacgtcgcagccctgctcgctgtggacttccattggcagcaggccataaccaacaaacgggtgatcggcacgggtatcacgggcgtgaccgctggcacgaaccatcgggccaacgttactgaagtcgcgagcgatttccgggtccagacgaccaatgccgacggtgcgttgttccatgttcggtgtgctcagcagcacatccaccagctcctgcacttcacgacgcatctgttgtgccagctggcgggtctggatcatgtcgtctttcagcagatcgcgacgaatcccgccgatcaggttcaggccgtaggttttacgtgcaccggtaaggatctctgccattttcatggaggtttcacgcacgcggaagaactgcataaagccggagtcgaagccggtaaagtgacaggccaggccgagattgagcagatgcgagtgcaggcgttctacctccagcagaatggcgcggatcatctgcgcgcgttctggcacctgaatacccatcgcgttttccaccgacgtggtataggcggtgctgtgagcaaagccgcagatcccgcacacacggtcagagaggaaggtcacttcgttgtaacccatacgggtttccgccagtttttccatgccgcgatggacgtagaacaggcggtagtcggcgtcgataatgttttcaccatcgacgaacagacggaagtgacccggttcgtcagaagtgacgtgcagtggaccaatcggcacgacgttgtttttcttgtcgcccagttcgttgatgaactcgtaggtttcagcatcggtagtcggtgccggacgctgacgataatccatgctgtctttacgcagaggataaagttcatccggccagtcatccggcagcaccagacgacgttcatccggcagaccaaccggaatcaaaccgtacatatcgcgcacttcacgctcgccccacaccgccgccggaacgcgcggcgtcacggaaggatactccggtttgttggcgtcaacttcgacgcgaaccgttacccaacacttggtgcccttctccatcgacagcacgtaataaacggcgtaatgaccattcagtttgcgttcgtcgttaccaaacagcaccgacagccaacccccttgtttgtagtagagaaactccaccacttccggcaggtagttcaccttcacggtgacggttagctgatctttggtctgccaggcgtggtccagcacgacgccaggaaatgcctcattcagcgcggcgagataatgttgacctaatttttcttcagacatgctcaaactctctttaatcacgccgccagcaaggagacgaacgctaaaaatgcaaagccaaacccagcccaggtaatgcgcggagtaatatcaagacgcagacgggccatgctgttttcgaacagcgcgataaccagtacgccgaccaccagtttgacgatggcaatcaccagcgccagcagcagcccaccgacggtgaaggtttccatttgtccccacggaataaacaccccgacgaacatctgcaacaccaccagctgtttcaggctgatgccccatttcatgacgccaaagccgctgccgctatactcagagagcggaccttcctgcaactcctgctcggcttccgccaggtcgaacggcagtttgcccatttcgataaaagtggcgaacgcacaggcacaaagcgccagcaccagcgggatgctctggctcagtggccagtgataaacggtgtcggtgatgttgctgatgttggtggaaccggcaacctgtgcggcgacccacagaccaagcagcagcatcggttcaaccaacacgccaagcatcgcttcacggctcgcgccgatagcggtaaacgggctaccggtatccagaccagaaatggcaaagaagaaacgcgcgatggcgaagagatacagtaaggtgatcaaatcgcccagttgcggcagcggagaaccgacggtcaccaccggcagcgcagtggcgatagtcagcatgacgcccaccatcacatacggcgtcaggcggaacacccagccggaggcatccgggccaacgctctgacgccccagcagtttgataatgtcgcgatactcctgcaacacgcccggcccgcgacggttatgcagacgggcacgcgccacacgggtaataccggagagcagcggcgcaacggcaaatagcaccagcgcctgaattaacggatataaaacactcattctcaggctcctcgtgaaacaataatcaccaccagcaccgccagttcaaccagcgccatccggcggaacagcaacgcactcccctcgcactgccagcccggcaccagcgacaccggattcaaccatttgcgtagtttcagcaccggcgcaaacgcctgtttcaccggcatggcaaaaccgtgagcggtaatcaccattgatttttcatgatcgtagccgcacacccaggccgcgccgcgggaacgcgacggcaaacgatcgcctttgcaaatcgccataatgatgaacggcagcagcgggcaggcaatcagcagcaacgtgatcatcggttgagaaacggtggtgttagcaggctccagcggcagaggtacagcagcagagagcatcggcagtagccacggcgcagcaacaccgccaattacgcagcaaatcgccagtgccactacgcttacgctcatcaggagcggcgcacaggtggcgttttcggcctctttggtacgcggcgcgccgaggaaagtaacgccataaactttcgccatacacatcaccgccagcgcaccggtaattgccagacccacggcgagcagcggcccgaacagacgggcaacaaacgcgccactattgctcagtttgaagaaggattgatagataacccattccccggcaaaaccgttcagcggcggcagcgcagccattgccatcagcccgactaacatggcgatggagataaccggcattttcttgccaataccaccgagtttttcgatatcgcgatgaccggtacggaaccagacgctccccgcaccaaggaacagtacgctcttgaacaggctatggttaatcagatggtacagaccaccaaccagaccaagggcaatcagcgccggttgttcgagcgcgatacccgttacgccagcgcccagccccagcaggataatgccgatattttccagggtgtggtaagccagcagacgttggatattgtgttccatcaacgcatacagaccgccgacgaatgcggtgatcatgccgagtaccagcagtacgatcccccaccacagcggtgcattaccgcccagtagtgacagagttaaaatgcccagcaggccaattttcatgactaccgtggaaaacagcgcggcagctggcgcagaggcgttggcatgtgcctgtggcacccagccgtgcagcggaataatcccggccagcaggccaaagccaatcacaccgagcagccagatatcggaaccgagcggcagctgttgcatacgcatatccagcaggcgcagatccagcgtaccgtaacgctgccacagcagccagcaggcaatcgccagcagcagagtgccaagacgccccagcgcaaaccacagtttgccctctttgctgttgctggtgaggaacaccgcacacagggccatgatttcggccattaccacgaacatgccgaggttgctggcgatgacggcacagacggcggcagccatcaacatattgatctgcaagccgttgcatttcacctgcgcgtggcgatgccagtcaatgttgtagaggctgacaaacagaccgcacagaccgagcgtaatcagccaaatcgcgttaagcggagagatttgcacatcgtagcttaccagcgacagcgcaccgctcacgccaaccgcgccagtcagcacagtgaagcccgcggctgccgtatacaggctacccaccgcgccgccaattccggctatccagccacttagcgctttttgaaaagaaaagagaaatgccagaacagcggcggcgacaaaccacgccacgccgctattgatcagggaaattgcgctcatttagcctctccactttgagcctgctgaaacaaggtgagatcgccaaagtccgtgttaaaagtcagctcacgcttacgtttgctgacgcgggcgatatcggtgttatccaccagatgcagggctttagtcgggcacatccgcacgcaggccggaccttgttcatcaaagctacaaaggtcacatttgacggcgatcgcgcgaatacctggcacccagtcaagcaatgtgctgacacgcgccggagcaggcggtgccggtggcgctttcggggtattggcgtttgccggaatatccagcggacggctgccggaaaattcaattgcgccaaacgggcaggcgataccacacagtttgcagcttacgcacagactttcattcaactgcacagcaccatcaacacgagtgatggcgttaaccgggcagaccaccgcgcagggtgcatcttcacagtgatgacagagctgcggcgcagattctttttcatttagcatcactcgcaggcgcggcattgattgcaggccgtgctggcgatgcgtctctgaacaggcagcctcacaagtgtggcagccgatacagagcgtggagtcagcaattacaaaacgattcaccaggcattcctcaggtgattgtcatttttgacgaaaacatgccgatgaaatgtcattttcgacactcatcgacacgcccatccccaaacaggcgtaacgcctgcaaaacgggcaaagcctcagctcatgctaccgggctttgtccctttaccagttggcttaaattcaccggcacattgttttcaatggcggtatataagctgtcgtaaacgccagcgattttttcgagatagtgttccaaaacttgttcgcgatcgcggatgttgaccttgccatcaatcatgccgtcaatgctcaactgcgcctgcgcaatccgctgtttgtcttcgccatcttttgtttcgacgtaatactcgatggtgtggctgttaaagccatccgccagggtgacgtaaatgcgaaaatgttcaaaaaggacgaaacagagttctttgtccggcgcgcagctcatggcgtgatgcaggcgcgctttcgataacgtgatcccctgaaccagcgaattgcagtagatgtgccactggtcctgtaggcgacgatgccgctgtgcgatgtaatcggctttctcgcttatttcccaaatagtcattgtcaggttacccgtttaacagagatgccagctttaagcattttctgtgccaacttttaattcattgttattaaagcgatttctaagctaaagatgaatttcgtcgccgtgtcgacgtgtcatttcgacatcatcgacattattcaccgcagggataatcaacactggcacaattattgcttgtagctggcaatagttaatgggaggcgatatgcacgaaataaccctctgccaacgggcactggaattgatcgaacagcaggccgcaaaacacggcgcaaaacgcgtaactggggtctggctcaaaattggcgcattttcttgtgtcgaaaccagctctcttgccttttgttttgatctggtttgccgcggcagcgtggcggaaggttgtaaactgcacctcgaagaacaagaggccgaatgctggtgtgaaacatgccaacagtatgtgacgctactgacccagcgcgtccgccgctgtccactgtgtcatggtgacatgctacagattgtggcagacgacggtttacagattcggcggatagaaatagaccaggagtgagcgatgtgtacaacatgcggttgcggtgaaggcaacctctatattgagggtgatgaacataaccctcattccgcgtttcgtagcgcgccatttgccccggcggcacgcccgaagatgaaaatcaccggcattaaagcgcctgaatttacccccagccagactgaagaaggcgacctgcattacggtcatggcgaagcgggcactcacgcgccgggcatgagccagcgtcggatgctggaagtcgaaattgacgtgctggacaaaaataaccgtctggctgaacgcaaccgcgcgcgctttgctgcccgcaagcaactggtgctcaacctggtttccagccctggttccggtaaaaccaccctgctgacggaaaccttaatgcgcctgaaagacagcgttccgtgcgcggttattgaaggcgaccagcaaaccgtgaacgatgccgcgcgcattcgcgctaccggcacaccagcgattcaggtgaacaccggtaaaggctgccatcttgacgcacagatgattgccgacgccgcgccgcgcctgccactggatgataacggtattctgtttatcgaaaacgtcggtaacctcgtttgcccggccagcttcgatctcggtgaaaaacacaaagtggcggtgctttccgttaccgaaggtgaagacaaaccgctgaaatatccgcacatgtttgccgccgcctcgctgatgctgctcaacaaagttgacttgctgccgtatctcaactttgacgttgagaagtgcatcgcctgcgcccgtgaagtcaatccagaaattgaaatcatccttatttccgccaccagcggcgaagggatggaccagtggctgaactggctggagacacagcgatgtgcataggcgttcccggccagatccgcactattgacggcaaccaggcgaaagtcgacgtctgcggcattcagcgcgatgtcgatttaacgttagtcggcagctgcgatgaaaacggtcagccacgcgtgggccagtgggtactggttcacgttggctttgccatgagcgtaattaatgaagccgaagcacgcgacactctcgacgccttacaaaacatgtttgacgttgagccagatgtcggcgcgctgttgtatggcgaggaaaaataatgcgttttgttgatgaatatcgcgcgccggaacaggtaatgcagttaattgagcatctgcgcgaacgtgcttcacatctctcttacaccgccgaacgccctctgcggattatggaagtgtgtggcggtcatacccacgccatttttaaattcggcctcgaccagttgctaccggaaaacgttgagtttatccacggtccgggttgcccggtgtgcgtactgccaatgggtagaatcgacacctgcgtggagattgccagccatccggaagtcatcttctgtacctttggcgatgccatgcgcgtaccagggaaacaggggtcgctgttgcaagcaaaagcacgcggtgccgatgtgcgcatcgtttactcgccaatggatgcgttgaaactggcgcaggagaatccaacccgtaaagtggtattcttcggcttaggttttgaaaccaccatgccgaccaccgccatcactctgcaacaggcgaaagcccgcgatgtgcagaatttttacttcttctgccagcacattacgcttatcccgacgctgcgcagtttgctggaacagccagataacggtatcgacgcgttcctcgcgccgggccacgtcagtatggttatcggcactgatgcctataattttatcgccagcgattttcatcgtccgctggtggtcgctggtttcgaaccccttgatctacttcaaggcgtggtgatgctggtggagcagaaaatagcggcccacagcaaggtagagaatcagtatcgtcgggtggtaccggatgccggtaacctgctggcgcaacaggcgattgccgatgtgttctgtgtcaacggcgacagtgaatggcgcggcttaggcgtgattgaatcttctggcgtgcacctgacgccggattatcaacgattcgatgccgaaacacatttccgcccggcaccgcagcaggtctgcgatgacccgcgtgcgcgttgtggcgaagtcttgacgggcaaatgtaagccgcatcaatgcccgctgtttggtaacacctgtaatcctcaaaccgcgtttggtgcgctgatggtttcctccgaaggagcgtgcgccgcgtggtatcagtatcgtcagcaggagagtgaagcgtgaataatatccaactcgcccacggtagcggcggccaggcgatgcagcaattaatcaacagcctgtttatggaagcctttgccaacccgtggctggcagagcaggaagatcaggcccgtcttgatttggtacagctggtagcggaaggcgaccgtctggcgttctccaccgacagttacgtcattgacccgctgttctttcctggcggtaatatcggcaagctggcgatttgcggcaccgccaatgacgttgcggtcagtggcgcaattccgcgctatctctcctgtggctttatcctcgaagaaggattgccgatggagacactgaaagccgtagtgaccagcatggcagaaaccgcccgtgcggcaggcattgccatcgttactggcgataccaaagtggtacagcgcggcgcggcagataaactgtttatcaacaccgctggcatgggcgcaattccggcgaatattcactggggcgcacagacgctaaccgcaggcgatgtattgctggttagcggtacactcggcgaccacggggcgactatccttaacctgcgtgagcaactagggctggatggagaactggtcagcgactgcgcggtgctgacgccgcttattcagacgctgcgtgacattcccggcgtgaaagcgctgcgtgatgccacccgtggtggtgtaaacgcggtggttcatgagttcgcggcagcctgcggttgtggtattgaactttcagaagcggcactgccggttaaacctgctgtgcgcggcgtttgcgaactgctgggactggacgcccttaactttgccaacgaaggcaaactggtgatcgccgttgaacgcaacgcagcagagcaagtgctggcggcgttacattcccatccattgggaaaagatgcggcgctgattggcgaagtagtagaacgtaaaggtgttcgtcttgccggtctgtatggcgtgaaacgaaccctcgatctaccgcacgccgaaccgcttccgcgtatatgctaataaaattctaaatctcctatagttagtcaatgaccttttgcaccgctttgcggtgctttcctggaagaacaaaatgtcatatacaccgatgagtgatctcggacagcaagggttgttcgacatcactcggacactattgcagcagcccgatctggcctcgctgtgtgaggctctttcgcaactggtaaagcgttctgcgctcgccgacaacgcggcgattgtgttgtggcaagcgcagactcaacgtgcgtcttattacgcatcgcgtgaaaaagacacccccattaaatatgaagacgaaactgttctggcacacggtccggtacgcagcattttgtcgcgccctgatacgctgcattgcagttacgaagaattttgtgaaacctggccgcagctggccacaggtgggctataccccaaatttggtcactattgcctgatgccactggcggcggaagggcatatttttggtggctgtgaatttattcgttatgacgatcgcccctggagcgaaaaagagttcaatcgtctgcaaacatttacgcagatcgtttctgtcgtcaccgaacaaatccagagccgcgtcgttaacaatgtcgactatgagttgttatgccgggaacgcgataacttccgcatcctggtcgccatcactaacgcggtgctttcccgcctggatatggacgaactggtcagcgaagtcgccaaagaaatccactactacttcgacattgacgatatcagcatcgtcttacgcagccaccgtaaaaacaaactcaacatctactccactcactatcttgataaacagcatcccgctcacgaacagagcgaagtcgatgaagccggaaccctcaccgaacgcgtcttcaaaagtaaagagatgctgttgattaatctccacgagcgggacgatttagccccctatgaacgcatgttgttcaacacctggggcaaccagattcaaaccttgtgcctgttaccgctgatgtctggcgacactatgctgggcgtgctaaaactggcgcaatgcgaagagaaagtctttaccactaccaatctgaatttactgcgccagattgccgaacgtgtggcaatcgctgtcgataacgccctcgcctatcaggaaattcatcgtctgaaagaacggctggttgatgaaaacctcgccctgaccgagcagctcaacaatgttgatagtgaatttggcgagattattggccgcagcgaagccatgtacagcgtacttaaacaagtggaaatggtggcgcaaagtgacagtaccgttctgatcctcggtgaaactggtacaggtaaagagctgattgcccgcgcgatccataatctcagtgggcgtaataatcgccgtatggtcaaaatgaactgcgcggcgatgcctgccggattgctggaaagcgatctatttggtcatgagcgtggggcttttaccggtgccagcgctcagcgcattggtcgttttgaactggcggataaaagctcactattcctcgatgaagtgggcgatatgccgctggagttacagccgaagttgctgcgtgtattacaggaacaggagtttgaacgtctcggcagcaacaaaatcattcagacggacgtacgtttaattgccgcgactaaccgcgatctgaaaaaaatggtcgccgaccgagagttccgtagcgatctctattaccgcctgaacgtattcccgatccacctgccgccactacgcgagcgtccggaagatattccgctgctggcgaaagcctttaccttcaaaattgcccgtcgtctggggcgcaatatcgacagcattcctgccgagacgctgcgcatcctgagcaacatggaatggccgggcaacgtgcgtgagctggaaaacgtcattgagcgcgcggtattgctaacacgcggcaacgtgctgcagctgtcattgccagatattgctttaccagaacctgaaacgccgcctgccgcaacggttgtcgcccaggagggcgaagatgaatatcagttgattgttcgcgtgctgaaagaaacaaacggcgtggttgccgggcctaaaggcgctgcgcaacgtctggggctgaaacgcacgactctgctgtcacggatgaagcgactgggaattgataaatcggcattgatttaacagatgtggttatactcgatcaacattcaatgaaaggaggcagtatggcagtttcagcaagaaatcaattaaccggaacagttagcgcagtagcaatgggcgctgtgaatgatgaagtagaactgacgctggcaggtggtgcaaagctggtggcaattgtgactcacagcagccagcaagcgctgggtctggcgaaagggaaagaagcgattgccctgattaaagccccgtgggtcacgctggcaacggaagactgtggactgaaattctctgctcgcaaccagtttgctggcagcgtgtcgacaatcaccgaaggcgcagtgaacgccactgtccatatcaaaacggatgcgggttttgaaattgtggcagtggtaacaaatgaaagtcaggatgaaatgaaactcaccactggctcgcgcgttattgcattgatcaaagcatcagccatcctgattgccaccaaagcgtaagcgccgtatttgccggagagtatggctctccggcagatttatttctttggacgatatttttctggcaactccggcaccggacgcttgtcatcgatgagatgacgcacggttaagatcggatgacgccacagcattctcggcccggcccaacgcataatctgtttcatctcttcacgctttgcaggctggtaacagtgcaccggacactgcttacaggctggtttctcttcgccgaacacacatttatccagccgctttttcgcgtaagcaaacaacgcctcgtaatgctccggctctgctgacgcctgcgggcatttcgcttgataaagatcgatcatttttttaatcgtcagtttttcacgagagatacgcttgccggacatgctgcctccatactcttaaggtgcatttatattacaacttaattttaaaggggactatgtctctgaaggaggaggtttcttcaaccgacgaatttggcgatcttgtttcatcgtcatcacgcaaaagctgcaaagcagcatttttcgcggaaccgacatcaagaactcacctttcgcgtcttcccctgaaatgattaactccggtatcatgtgcgccttatgtgattacaacgaaaataaaaaccatcacactacatttaacatcagggagccggacttaaccccatgagtacaatagaaaatttcgacgcccatacgcccatgatgcagcagtatctcaagctgaaagcccagcatcccgagatcctgctgttttaccggatgggcgacttttatgaactgttttatgacgacgcaaaacgggcgtcgcaactgctggatatttcactgaccaaacgcggtgcttcagcgggagagccaatcccgatggcggggattccctaccatgcggtggaaaactacctcgccaaactggtgaaccagggcgaatcggttgctatttgtgaacagattggcgatccggcgaccagcaaagggccggtcgagcgcaaagttgtccgtatcgttacgccgggcaccatcagcgatgaagcgctgttgcaggaacgtcaggacaacctgctggcggctatctggcaggacagtaaaggtttcggctacgcaacgctggatatcagttccggtcgttttcgcctgagcgaaccggcggaccgcgaaacgatggcggcagaactgcaacgtacgaatccagcggaattactgtatgcggaagatttcgccgagatgtcgctgattgaaggtcgccgcggcctgcgtcgtcgcccgctgtgggagtttgaaatcgacaccgctcgccagcaattgaacctgcaatttggcacccgagatctggtcggttttggtgtggagaacgcaccacgcggactttgtgctgccggttgtctgttgcagtatgcgaaagatacccaacgcacgaccctgccgcatattcgttctatcactatggaacgtcagcaggacagcatcattatggatgccgcgacgcgtcgtaacctggaaattactcagaacctggccggcggtgcggaaaatacgctggcttccgtactcgactgcactgtaacgccgatgggtagtcgtatgctgaaacgctggctgcatatgccagtgcgcgatacccgcgtgttgcttgagcgccagcaaactattggcgcattgcaggatttcaccgccgagttacagccggtactgcgtcaggtgggcgacctggaacgtattctggcgcgtctggcgttgcgtaccgctcgcccgcgcgatctggcccgtatgcgtcacgctttccagcaactgccagagttgcgtgcgcagttagaaaatgtcgatagtgcaccggtacaagcgctgcgtgagaagatgggcgagtttgccgagctgcgcgatctgctggagcgagcaatcatcgacacaccaccggtgctggtacgcgacggtggtgttatcgcatcgggctataacgaagagctggatgagtggcgcgcgctggctgacggcgcgaccgattatctggagcgtctggaggtccgcgagcgtgaacgtaccggcctggacacgctgaaagttggctttaatgcggtgcacggctactacattcaaatcagccgtgggcaaagccatctggcaccaatcaactacatgcgtcgccagacgctgaaaaacgccgagcgttacattattccggagctgaaagagtacgaagataaagttctcacctcaaaaggcaaagcactggctctggaaaaacaactttatgaagagctgttcgacctgctgttgccgcatctggaagcgttgcaacagagcgcgagcgcgctggcggaactcgacgtgctggtgaacctggcggaacgggcctataccctgaactacacctgcccgacctttattgataaacctggcattcgcattaccgaaggtcgccatccggtagttgaacaagtactgaatgagccgtttatcgctaacccgctaaacctgtcgccgcaacgtcgcatgttgatcattaccggtccgaacatgggcggtaaaagtacctatatgcgccagaccgcgttgattgcgctgatggcgtatatcggcagctacgtaccggcgcaaaaagtcgagattggcccgattgaccgtatctttacccgcgtaggtgctgcggatgatctggcttccgggcgttcaacctttatggtggagatgaccgaaaccgccaatattttacataacgccaccgaatacagtctggtgttgatggatgagatcgggcgtggaacgtccacttacgatggtctgtcgctggcgtgggcatgtgcggaaaatctggcaaataagatcaaagcgttgacgctgtttgctacccactatttcgagctgacccagttaccggagaaaatggaaggcgtcgccaacgtgcatctcgatgcactggagcacggcgacaccattgcctttatgcatagcgtgcaggatggcgcagcgagcaaaagctacggcctggcggttgcagctctggcgggtgtgccaaaagaggttattaagcgcgcacggcaaaaactgcgtgagctggaaagcatttcgccgaacgccgctgctacgcaagtggatggtacacaaatgtctttgctgtccgtaccggaagaaacttcgcctgcggtcgaggcactggaaaacctcgacccggattcactgactccgcgtcaggcgctggagtggatttatcgcttgaagagtctggtgtaataataattcccgatagccttttgctatcgggaatattaacgacaactgacgaatcaaataaaaataccctgtataataggaaaacttattttacagggtaaaaccatgccatctacgcgctatcaaaaaatcaatgcccatcactatcgccatatatgggccgttggtgatattcatggtgactatcaattattacaatcccgcttacatcaactctctttttgtcctgaaaccgacttacttatttctgtcggcgataacattgatcatgggccggagagtcttaacgtgctgcgcctgttaaaccagccctggtttacatcggctaaaggcaaccacgaagcgatggcgcttgaggcattcgaaactggcgatggaaatatgtggcttgccagcggtggtgactggtttttcgatttaaatgattcagagcaacaagaggcaatagatctgttgctgaaattccatcaccttccacatattattgaaatcactaacgacaccataaaatatgtcatcgcacatgcagattatccggggaaggagtatcagtttggcaaagaaatagcggagagcgaattactctggcctgttgatcgtgtgcagaaatcacttaatagcgaattacaaaaaataaacggcgccgacttctttatatttggtcatatgatgtttgataacattcagacgttcgctaaccagatttatatagataccggatcgccgaaaagcgggcggctgtcattttataaaataaagtagtctcatgcttcttctgtgaagcatgagtaacccggcgttattgcaggtcattattcatttttcgctaccagcaaagagagatccagcttcgccagcgcgcggctggcactctccggcagaccatcgtcagtaatgatctgatcaaactcgcttaatggtaacgccagccatgtcgccacctgtccatatttcgtcgcatcacagaccaaaactcgctggcggctggcactggcaatcgcccgtttcaccgtgactttatcttctgctggcgtagagatcccccgcacactccatgacgatgcagaaataaaagcctgatcaatcatcaggctacgcagcatggtcgcagcggcttccccaacacaggaacggttttcccgacacactgcgccgccagtgtgaataattgtgcaattactgttgtcgagcaagtagtccgcaataacgaagtcgttagtaaccactgtgagtggctccatgtgagtcagatgctgtgcaatcgctaacgtggtcgttcccgcatccagatagatacaacgtcccggctgaacaagacttgccgccagcttgccaatagccgctttttgcgtcattgccagcgcagtttttacctgatgagaaggttcatgtgccacgcgtcccggagactggacgcccccggacaccaacacaacggctccctgctgctccagtttttgtaaatcccgacgaatggtcatatgtgacacattcattctgtccgttagttcagcaatactaacaatgcctttttcagctaccatctcaaggatgatttggcgacgctctacgggtatcaacttttgctccttcctttgtcctgctgacattctacgctatttgcctgcgaaacgtgcgcggcgcaactaacgcttagttcacataaaataacacgcaatgttaatttttgtgaatcagctcaccatatcgttatctttccgcgcttatattcacaacatcaaacaaaatatcacttaaattaacaaggagagcagatgaaaacgggatcggagtttcatgtcggtatcgttggcttagggtcaatgggaatgggagcagcactgtcatgtgtccgcgcaggtctttctacctggggcgcagacctgaacagcaatgcctgcgctacgttgaaagaggctggtgcttgcggagtttctgataacgccgcgacgtttgccgaaaaactggacgctctgctggtgctggtggtcaatgcgacccaggttaaacaggtgctgtttggtgaaaaaggcgttgcacaacatctgaaacccggtacggcagtaatggtttcttccactatcgccagtgctgatgcgcaagaaattgctaccgctctggctggattcggtctggaaatgctggatgcgccggtttctggtggtgcggtaaaagccgctaacggtgaaatgactgtcatggcctccggtagcgatattgcctttgaacgactggcacccgtgctggaagccgttgccggaaaagtttatcgcatcggttcagaaccgggactgggttcgaccgtaaaaattatccaccagttgttagcgggcgtacatattgctgccggagccgaagcgatggcgcttgcagcccgtgcggggatcccgctggatgtgatgtatgacgtcgtgaccaatgccgccggaaattcatggatgttcgaaaaccggatgcgtcatgtggtggatggcgattacaccccgcattcagccgtcgatatttttgttaaggatcttggtctggttgccgataccgccaaagccctgcacttcccgctgccattggcctcaacagcattgaatatgttcaccagcgccagtaacgcgggttacgggaaagaagacgatagcgcagttatcaagattttctctggcatcactctaccgggagcgaaatcatgatcaagattggcgttatcgccgatgattttaccggcgcgacggatatcgccagttttctggtggaaaacggtctaccaacggtacaaattaacggtgttccaacaggtaaaatgccggaagcaatcgacgcactggtgatcagcctgaaaacgcgctcctgtccggtggttgaagccacacagcaatcgctggcggctctgagctggttgcaacagcaaggttgcaaacagatctatttcaaatactgctctactttcgacagtacggcgaaagggaatatcggcccggttaccgatgcattaatggatgctctcgacacgccgtttacggtcttctctccggccctgccggtcaacggacgtacggtttatcaggggtatttgttcgtaatgaatcaactgctggccgaatccgggatgcgccatcacccggtaaatcccatgaccgacagctatcttccccgtctggttgaatcgcaatccacagggcgctgcggcgtcgtttcagcacatgttttcgaacaaggtgtgaaagccgttcgtcaggagctggctcgcttacagcaagagggctatcgctacgcggtgcttgatgcgctgaccgaacaccatctggaaattcagggggaagccttgcgcgatgccccactggtaacgggcggttctggtctggccattggcctggcccggcagtgggcgcaagaaaacggtaaccaggctcgcgaagcagggcgtccgctcgctgggcgcagcgtagtgctctccggttcatgctctcaaatgaccaaccgccaggtggcacattaccgtcaaattgcaccagcccgtgaggttgatgtggcacgctgcctctcaaccgaaactctggccgcttatgcacacgagctggcagagtgggttctgggccaggaaagtgtacttgctccactggtttttgccaccgccagcactgacgcattggcagcaattcaacagcaatacggtgcacaaaaagccagtcaggcagtggaaacactgttttctcaactagcggcgcggttagcagcggaaggcgtgacacgctttattgtcgcaggcggtgagacctccggcgtagtcacacagagcctgggcataaaaggttttcatattggcccaaccatttcccccggcgtgccgtgggtaaacgcactggataagcctgtctcactcgcccttaaatctggcaacttcggtgatgaagcctttttttcacgagcccaaagagagtttttatcatgagcgatttcgcaaaagtagagcagtctttgcgagaggagatgacgcggattgccagttcattctttcagcgcggatatgcaactggttcggctggcaatctgtcgctgcttttacctgacgggaatttactggcgacaccgacaggttcatgcctgggcaatctcgatccacagcggctttccaaagtcaccgcggatggcgaatggttaagtggtgacaaaccctcgaaagaggtgctctttcatctggcgctgtatcgcaacaatccgcgctgtaaagcggtagtgcatttgcacagtacgtggtcgacggcgctttcctgcctggaagggctggacagcaataacgttattcggccgttcacaccatacgtggtgatgcggatgggtaatgtcccgctggtgccctattaccgaccgggcgataaacgcatcgcacaggatctggcggaactggcagcagacaatcaggcttttttactggcaaatcatggcccagtggtttgcggtgaaagcctgcaagaagccgccaacaatatggaagagctggaggaaacggcaaagctgatttttattctcggtgaccgcccgatccgttatctgaccgcaggtgaaattgcggaattaaggagttaatgcaatgcctcgttttgcagctaatttatccatgatgttcaccgaagtgccttttattgaacgcttcgccgcagcgcgaaaagccgggttcgatgctgtggagtttctgtttccctatgactactccccccagcaaatccagcagcaactggtgcaaaaccacctgacgctggcgctgttcaataccgctcccggagatattaatgcgggagaatggggattatccgcccttcccggacgtgagcacgaagcacgcgcagacatcgacctggcactggaatatgcattggcgctcaattgtgaacaagtccatgtgatgtcaggcgtcgtgcccgctggcgaagatgctgaacggtaccgggcagtatttattgataatctccgctacgctgccgaccgctttgcgccacacggcaagcgaatattggttgaagcactcagccccggcgttaagcctcattatctcttctccagccagtatcaggcactggctattgttgaagaggttgcgcgagataacgtgtttattcaactagatactttccatgcacaaaaagtagatggcaacctgacacatttaatccgcgactacgccgggaaatatgcgcacgtacaaattgccggactacctgatcgacatgaaccggacgatggagaaatcaactatccgtggctgttccgcctgttcgatgaagtgggatatcagggctggatcggttgtgaatacaaacctcgtggcctcaccgaagaagggcttggctggtttgacgcctggcgctaattcgctcaatccctaattacaacgtacccatacatccccccatctacggatggggtaggttaactataactttcagacagggtttcccatgtccacaattacattgttatgcattgcgttagctggcgtaatcatgctgttgctactggtcatcaaggcaaaggtacaaccattcgttgctctgctcctcgtcagcctgttagtcgcacttgcggcgggtataccggcgggcgaagtgggtaaagtgatgatcgccgggatgggcggtgtgcttggttccgtcactattattattggtctgggcgctatgctggggcgtatgatcgaacactctggtggtgcagagtcactggctaattatttcagtcgcaagttaggtgacaaacgaactatcgctgcgctgactctggcagcgttcttcctcggtattcccgtcttctttgatgtcggctttattattcttgcgccaatcatttacggttttgccaaggttgccaaaatatcaccactcaaatttggcctgcctgtcgctgggatcatgctcactgttcacgtggcggtaccgccgcatccaggccctgtcgccgcagcggggttactccacgcagacatcggctggctaaccatcatcggtattgcgatttctattcccgtagggattgttggctactttgcagcgaaaataatcaataagcgccaatatgcgatgtcggtcgaggtactggaacagatgcaactggctccggccagtgaggaaggcgcgacaaaattaagcgataaaataaatccaccgggcgtcgcgctggtcacctcgctaattgttattcctatcgcgattatcatggcgggtacggtttctgcaacactgatgccgccttcgcatcccctgcttggtacgctacagttgataggctcaccaatggtagctctaatgattgcgctggtgctggcattctggttattggctttacgtcgcggctggagcttacaacacaccagcgacattatgggctctgcccttcccactgcggcggtagtgattttggttactggtgctggaggggtatttggcaaagtgctggtggaatcgggcgtcggtaaagcccttgccaacatgttacaaatgattgacctgcctctgttaccagccgcatttattatttcactggcgctgcgtgcatcgcaggggtcagcaaccgtagcaatcctgacaaccggcgggttactctcagaagcggtgatgggattaaatccgattcagtgcgtattggtgacgctggcagcctgctttggtgggcttggcgcgtcacatattaatgactcagggttctggattgtgaccaaatatctggggttgtcggtagcagacggtctgaaaacctggacagtgttaacgaccattctcggttttaccggattcttaattacctggtgcgtatggctcgtcatctaataatccagataagatatgatgtatcgtttaagtgcctgataagggtgtaatgtatgccaatattaacctcggtaatatctcgctaccgaggttaattttcactttgcaatataattacagtctcttgcaagttgattttatcttagtaataagaaccgaccaatcttattgccatttcgatattagcaggcatagatgcgtcgtagccatacatatggccatatttcggacgtaatacttcagttactttcttaataattgcttcgcgctgggctcgcgcaaaatcagcatgattatttgccgttttattcataaatttaccaaaactttcttcttttctgactttaattgtcgtatcccgaagatcattaagaaactggcgttgaaatttaaaatcatcgtgtgaaccaatattaccatgcccgccaataaaatatttccagtcaagcatttcaacctgacgcaaattactgtcatggtaaaccaacgtatccgatacggcgaagcccatcatcggcagttggtcaggattcaggagatccgggctgtgagctactttttcctgttttagcaaccatacagaatggtcgtcggtatgtcctgctttaacaaatcggtgtaattcaatggtctgcttttcaaatttaaactggtcatcttttttacttaaaacctgagtggcgacgggtaagcgactgttcataaattgcattttttcagcagtggctttactggcaataatacgcagattcacgccttctttcttcgcctcatcgttccaaaatggactatcgccaatgtgatccacatggtaatgagaataaaccagcgctgttacgggtaatggagtcacatcacgaattgcctgtaataaatatttaccgcgaccctccggagcatcaaacagcaaaacccctttgtctccgacataaaacgtagtggaataaaaatagcgttgaacataataagttctctcgccaattttttgtaaaatataaggctgagacatatttctttcaaaaaggttattgagtttatcgcttggcgatattattttttccgctgaaggttcaacataacttgcattaactgtagacgaatttgcagtcgaaatttccgtttgagcaaaaatactaccagatataagagaagaggctagaattgtatatattttaatgccttgcatacgtagtcctttattaatgtgttgttgatttatagcatctctgaacagactgttattttagatattactacgttacgagattcatttttcttcgaatattatgtttatctcattcaaaaaatatgttcatcatttgatggtttaaataatatctgcaaggcataatactccacatctttaaaacctgcctcaaaaaatcattcattagtaaaaaggatatttatatgcaaaacatagctgtggtttattattcaggatatggtcacactaaactggttgctgaaaaagtggcacaaggcgcccatgcagatttaatttcgattgataacgaaggaaatatcactgagcaggagtgggaaaaactggacgcagccgatgccattatcttcggtgctcccacctatatgggcggtgcgccatggcaattcaagaaatttgctgatgccagttccaaagcgtggtttacacgtaaatggcaggataaagtcttcgggggtttcaccaacagcgccagcctgaatggcgataaacaagttacgctgatctatctgcaaacgctggcttcacagcatggcggtctgtgggtgagtttaggtcaggctcctgccaatgtgcttgcgtcaaccagggaagatgtaaacaatctgggcggttcagtcggtttgctggtgcaatctccagccgatgcgggtgcagaccaaatccctacgggcgatctggatacagccgtgaaatatggtgaacgcgtggcgacaattactgtgcgcttaaaatgatgattgccaaatgtgacgctgacgcgtctatccggtcttctacatctaaaaagtgccgtcccctggtcagtcagataaagttttaacgctgtacccgataacagttcaacatgtaccatgtaccaaaagaaaaaaagccagcctcgcttgagactggcctttctgacagatgcttacttactcacggaacagcgcttcgatattcagcccctgcgtttgcaggatttcgcgcaaacggcgcaggccttcaacctgaatctggcgaacacgttcacgggtgaggccaatttcacgacctacatcttccagtgttgccgcttcgtaccccagcaaaccgaatcgacgtgccagtacttcacgctgtttggcgttcagctcgaacagccatttgacgatgctctgcttcatatcgtcatcttgcgtggtatcttccggaccattctctttttcatcggccaggatgtccagcaacgctttttcggaatcaccacccagcggggtgtctaccgaggtaatgcgctcgttaagacgaagcatacggctgacgtcatcaactggcttatccagttgctctgcgatctcttccgcacttggttcgtggtccagcttatgggacaactcacgtgcggttcgcaggtaaacgttcagctcctttacgatgtgaatcggcaaacgaatagtacgggtttggttcataatcgcccgttcgatcgtctggcgaatccaccaggttgcgtatgttgagaagcggaaaccacgttccgggtcaaacttctctaccgcgcggatcagccccaggttgccctcttcgatcaggtccagcaacgccagaccacgattgccataacggcgggcaatttttaccaccagacgcaagttactctcgatcatccggcggcgagaggcaacatctccacgcagtgcgcgacgcgcaaaataaacttcttcttcggccgttaacagtggtgaataaccaatctcaccaaggtaaagctgagtcgcgtccagcacacgctgtgtggctccctgcgataacagttcctcttcggccaaatcgttatcactgggttcctcttctactaaggccttttcgtcaaaaacctcaactccgttctcatcaaattccgcatcttcatttaaatcatgaactttcagcgtattctgactcataaggtggctcctacccgtgatcccttgacggaacattcaagcaaaagcctggttccgccgatttatcgctgcggcaaataacgcagcgggtttacggatttccccttgtaacgaatttcaaaatgcaagcgtgttgaactggttccggtgctacccatggttgctattttttgccccgccttcacttcttgttgttcccggaccagcattgtgtcgttatgggcgtaggcactcaggtaatcatcattatgtttgatgataatcagattaccgtagccgcgcagcgcgttaccggcataaacaacgcggccatccgcggtcgcgataattgcctgtcctttgctgcctgcgatatcaatccccttgttgcccccctcagaagcgccaaaggtttcgatcactttgccctcagtcggccagcgccaggtggagataggcgtactggttgatgtactgctgacaatcggctcggttgtgcttgctgttggtaccgttacaggcgctgtgaccgtggtcgcagttggcttgttgttcggcaacattttgttagcactctgttcacccgaagactcagaatacgtaattgtcggttgcgacgcaacagcaacggtggaattttgtgcaggcttgatcacaactccttgctctgctgcgtcggcctgggtaatggcatttccgcctgtgattggcgtaccggaagcattacccacctgtaaggtctgaccgacgttcagcgcgtatggtgcctgaatattgttgcgctgagcaaggtcacggaaatcgttgccagtaatccaggcgatataaaaaagcgtgtcgccttttttcacggtgtatgtactgccgctataactgcctttcggaatgttcccatactgacggttgtagacgattcgtccgttttccatctgtaccggctgctgagctactggctgcataggctggatttgcggttgttgagtagcctgaatttgtggctgctgtaccggctgaatttgcggttgctgcgctgtagacgtcgtccccattttcggcggcggcgtaatcaacataccagaattggtatttgcgggcgcattgccattaacggagctgaccggtgccggtggatttgaagtgtcagaacagcctgccagccatagcgaaaccagtgacaatgccgcaatgcggcgaacggtgaattttgggcttcccgcgctcatttatcccccaggaaaaattggttaataaccagtgacataattaccgtgcaaggcaccatactgaacactggaaaagatgttcacgatacgctgacctgcggcaaaataaccaggaaaaatccaggtatttcctcacgctttaagccagctcacccttcactaaagggacaaagcgcacggcctccacggtatcgataataaattcgcctccccgacgacgcacccgtttcaaatactggtgctcctcccctacgggtaagacgagaatcccgccttcgtccagctgcgtcattagcgcagttggaatttcaggcggtgccgccgtaacaatgatagcgtcaaacggcgcgcgtgcctgccaaccttgccatccatcgccatgacgggttgaaacattatgtaaatcaagatttttcaggcggcgacgcgcctgccactgcaagcctttaatccgttcaaccgagcaaacatgttggacaagatgcgccaggattgcagtttgatatcccgaaccagtgccaatttccagcacccgcgactgcggcgtcagctcgagtaattcggtcattcgcgccaccatatacggctgcgaaattgtctgcccctgacctatcggcaaggcgatattgtcccaggctttttgttcaaacgcttcatcaacgaatttttcacgcggcacggcggcaagtgcattcagcaccagctcatcctgaataccttgcgcacgtaattgatccagaagtgcttgtacgcgtctgcttaccattgcgtgccaactcccacgctgtttaaccagtctgaaaccacatcttgcgcgctatgcgcagttaaatccacatgcagcggcgtgatggaaacatagccctcatctaccgcagcaaaatcggtccccggaccggcatcacatttaccgcccggcgggccaatccagtacagcgtattgccgcgcggatcttgctgcgggatcacctgatctgccggatgtcgtgtaccgcagcgcgtcacgcgaatacctttgatttgatccaatggtaaatccggaacgttaatattaagaatacgcccggtgcgcagcggctctttacacagtgcgcgcaaaattgagcaggttaccgccgcggcagtgtcgtaatgtttatgcccgtcaagcgagacggcaagcgccggaaaacctaaatgacggccttccatcgcggccgctaccgtaccggaataaataacatcatcccccagattcggcccggcgttaattccggacacaacaatgtccgggcgcgggcgcatcagagcatttacgccaagatagacgcaatcggtcggggttcccatttgcacagcaatatcaccattttcaaaggtaaacgtgcgcagggaggattccagtgtcagagaattagaagcgccgctgcggttacgatcgggggcgaccacctgaacgtcagcaaactcacgcaaggctttcgccagcgtttgtataccgggtgcatgtaccccgtcatcattactcagcaatatgcgcataatcacctgttgtgttgataagttccctgacaacgctggttgcaaaacttcccgccggaagccagaaacggatttctacggtgacgtcatcccaccagttccagcttaattgttgcggatacagcagcatcgctctgcgcgcggcttcaactttttcgcgcaccagtaaggtttgtaattcagtttcttcggcgacagctgcttgttcgaatgccagcgcttcacgctgagttccccattcgccactgcccggcaatgcggcggttatcatcagctctttatcgttgacgcgacgctgtaattccgccagttcttcggtggttgcgacaaaccagctaccacgtccggctaattgtagcgcatcgccgtcaacaacttgattaacgtctgcttttttgaggcgctcagcaacaatctgattaaacaacgcactgcgggctgccgacaaccaaaaactacgtttattgcgatcgcgcaccggagtattggtttgcgcccagcgcagcgcaccctgcaagttgctaccgccaatcccaaaacgttgggcaccgaagtagttcggtacaccttttacgcaaatatcgatcagacgttgttcaacgtcatcgcgattgctcacttcgcgtagtaccagggtaaaggcgttacctttcagcgcccctaaacgcagcttgcgcttgtgccgcgcatactccagcacctggcagccttccagttgaaaggcgctcagatcgggcatctctttgcccggcacgcgagcgcataaccactgttccgtaacagcatgtttatctttttgcccagcgaagctgacttcacgggcatgaattttcaggaatttcgccagtgcatccgccacaaaacgggtattgcaaccgtttttgaggattctaaccagaatatgctcaccttcaccatcaggctcaaagcccaaatcttccaccaccacaaagtcttccggattcgctttcagcagcccggtgccttgcggtttaccgtggaggtaagtgagattatcaaactcaatcattttgttgccttaatgagtagcgccaccgcttcacaggcaatcccttccccacgtccggtaaatcccagtttttccgtagtagtggctttcacgttaacatcatccatatggcagccgagatcttcggcaataaacacgcgcatttgtggaatgtgcggcaacatcttcggtgcctgagcgatgatagtgacatcgacgttgccgagggcataacctttcgcctgaatacgacgccaggcttcgcgcaacagctcgcggctgtcggcacctttaaatgccggatcggtatccgggaacagcttgcctatatctcccagcgccgccgcgccaagcaatgcatcggtcaacgcatggagcgccacgtcgccatcagaatgcgccagcagccctttttcgtaaggaatgcgtacgccaccaatgataattgggccttcaccgccaaaggcgtgtacgtcaaaaccgtgtccaattcgcattatgtattctcctgatggatggttcgggtgaggtaaaattcggccagcgccaaatcctccgggcgcgttaccttgatgttatccgcgcggccttcaacaagttgcggatgaaaaccgcaatattccagcgccgaggcctcatcggtaatggtagcgccttcatttagagcgcgcgtcaggcagtcatgtaacagctcacgagggaaaaattgcggcgtcagcgcgtgccataagccgttgcgatcaacggtatgagcaatggcatttttgcccggttcggcacgtttcatcgtatcgcgcaccggcgcagcgaggatccctcccgtgcggctggtttcgctcaacgccaacaatcgcgcgaggtcatcctgatgcagacaaggacgagcggcgtcatgcaccaatacccactgcgcgtcgccagcggctttcagacctgccagcacggaatcggcacgctcttcaccaccatcaacaaccgtgattcgtggatgattcgccagaggaagttgtgcaaagcggctatcgccaggacttatggcaatgacgacacgtttcaccctgggatgcgccagcagcgcatgcaccgagtgttcaagaatggtttgattaccgattgagagatattgcttaggacattccgtttgcattcggcggccaaatccggccgccggaaccacggcgcaaacatccaaatgagtggttgccatgttaattcccgggctgatttatcgattattttgccccgcagactgtgcgcgctttgacgcgtcaggcaccagacgataaaacgtttcgcccggcctggtcatgctgagttcattacgcgcacgctcttcgagcgcctcctggccgccattgagatcgtcaatttcggcaaaaagctgatcgtttcgcgctttaagtttcgcgtttgtagcttgctgtgccgccacatcattattgacgcgagtatagtcatgtataccgttcttaccgaaccacagcgaatactgtagccagaccagaatagccagcaacagcagcgttagtttacccatcctgccccctgaaaaacggcatcttcatcccatgcatccgaagacgactctacatcctctgttggggataccgcgacaacgcgggcaaatgtaccacatttgtcgattgttacgtatacccagggcgtgcagaacataatctcattattagttacggattgaattatgaacagaatagagaggaaagaacaattaacccagtagccacataaacagtgcaccaaacataatgccaaccgtcgccagagtgaaaacaatactgtagcgtagctttccgtccatcaatgaatgcagtgcaatccccaccactacagcgacgggcatcagcgccagaaagaaaggccaggtgtagataaaaaagagcagcgtgttagagccataaatcaacatcggaattgccaacgcgcacagccacgataaaaaaccaaccacagcgccaggcagcgaccatgtggtgtcttcaacctcagtaaggctgtcgttatttgttaatgtaatgttgtggctgttacgcatatctgatcctgttactttgacgaaccgggcatgaaaacccggtggtgtctcaggatctgataatatcgttctgtctcaacagatctaataattgctgtaccaaatttgttactaattgttcaccattgagatgaatttctgccgattcaggcgcttcgtaaacggaatctattcccgtaaagttgcgcagttcaccggcacgcgctttcttatataaaccttttggatcgcgggcttcgcaaatcgccagcggcgtatcgacaaacacttcgataaagcgcccttctcctacgcgttcgcgaaccatctggcgttcggcgcggtgtggcgagataaatgcggtcagcaccaccagtccggcttcaaccatcaaattcgccacttcaccgacgcgacggatattctctttacggtcggcatcgctaaaaccgagatcgctgcataatccgtggcgaacgttgtcgccatccagcagatacgtactgacgccaagtttatgtaacgcctcctccagcgcccccgcgacggttgatttaccggaaccagagaggccggtaaaccacagcacaacaccacgatgaccgtggtgctgttcgcgttgttgcggagttactgggtggctatgccagacgacgttttcgtcatgcagagccattatttatctcccagtaaatcgcgcgcaccccaatgcgggaaatggcggcgaaccagggcattcaattccagttcgaatgcactgaattcagatggcgcagcagttgcctggctaactggttcgtgcaccataccggcacctacggtcacattactcaggcgatcgataaaaatcagcccaccggtaaccgggttttgctgataacgatctaacaccagtggctcgtcaaaggtgagatctaccaggccgatgccgttcagcggcaggttttcaacttcgcgttgggtaaggttattgatatcaacctgataatgaatgccatcaacacgagcacgcgtcttcttaccggcaattttgatgtcgtaactctggcccggggaaagcggctgttccgccatccataccacatccaccgacgcgctctgcacagccggtaacgcttcgtctgccgccagcagcagatcgccacggctgatgtcgatctcatccgtcagcaccagggtgatcgcttctccggcaaaggcttcttcgcgatcgccatcaaaggtcacgatccgcgcgacgtttgattccacaccagagggcagcactttgacacgttgcccgacttccacacgaccggatgccagcgttccggcgtagccacgaaaatcgagattcggacggttaacgtactgcaccgggaagcgcattggctgagcatccaccactcgctggatctccacggtttccagcacttctagcagtgtcggaccgctgtaccacggcatactttcactttgcgaagccacgttgtcgccttccagtgcggagagcggcacaaagcggatatccagattacccggcagctgcccggcaaaagtcagataatcttcacgaatacgggtgaacgtctcttcactgtaatccaccagatccattttgttgatcgccacgaccagatgtttgatccccaacagtgtggagataaaactgtgacgacgggtttgatcgagcacgcctttacgggcatcgatcagtaagatcgccagttcacatgtcgatgcgccagtcgccatattgcgggtgtactgctcgtgccctggggtgtcggcgataataaatttacgcttctcggtagagaaatagcggtaggccacatcaatagtgatgccctgttcgcgctcagcttgcaggccgtccaccagcagtgccagatccagcttttcgccctgggtgccgtgacgcttactgtcgttatgcagcgatgagagctgatcttcgtagatttggcgggtatcgtgcagcaggcgaccaatcagggtacttttgccgtcatcgacgctaccacaggtcagaaaacgcagcaggcttttatgttgttgcgcaatcatccaggcttcgacgccgccttcattggcgatttgttgtgcaagtgcggtgttcatcttaaaaatacccctgacgttttttcagctccatagaccccgcctggtcgcggtcaattacgcggccctgacgttcactggtggtggaaaccagcatctcttcgatgatctccggcagtgtttgcgcatttgactccaccgcgccggtcagcggccaacagcccagtgtgcggaaacgcaccatccgttttttaatcacttcgcccgattgcaggttgatacggttgtcatcaatcatcatcagcataccgtcgcgttccagaaccggacgttccgcagcgagatacagcggaacaatgtcgatattttccagccagatgtattgccagatatcctgctcggtccagtttgagagcgggaagacgcggatgctttcgcctttgttaatttgcccgttgtagttgtgccacagctccgggcgctgatttttcggatcccagcgatggaagcggtcacggaaagagtagattcgctctttagcgcgggatttctcttcgtcacggcgcgcaccaccgaaggcggcatcaaaaccgtatttgttcagcgcctgtttcaggccttcagttttcataatatcggtatgtttcgcgctgccgtgtacgaatggattaatccccatcgccacgccttccgggtttttatgcaccagcagctcgcagccgtaggctttcgccgtacgatcgcggaactcatacatctcgcggaatttccagccggtatcgacatgcagcaacgggaaaggcagcgtacctggataaaacgccttgcgcgccagatgcagcatgacgctggaatctttaccgatagagtagagcatcaccggatttgagaattctgcagccacctcgcgaataatgtggatgctttccgcctccagttgccgcaggtgggtaagtcgtttttgatccataaccgttcctttgcaataccgctattttcttgccatcagatgtttcgactatagggagcgtaagagaacgaatgaaattaccaattagaatgagtagttccttaacggaataacgatttggcaaagctaatatcaaaaagtgcttaaggcaccggatttcgggcgtttaggaagatttgaaattgttttagcgcagcggcagtttcatactatggcggtaaaaaaatttgcatggtatttaaggactcactatgttttccgcattgcgccaccgtaccgctgccctggcgctcggcgtatgctttattctccccgtacacgcctcgtcacctaaacctggcgattttgctaatacccaggcacgacatattgctactttctttccgggacgcatgaccggaactcctgcagaaatgttatctgccgattatattcgtcaacagtttcagcaaatgggttatcgcagtgatattcggacatttaatagtcggtatatttataccgcccgcgataatcgcaagagctggcataacgtgacgggaagtacggtgattgccgctcatgaaggcaaagcgccgcagcagatcatcattatggcgcatctggatacttacgccccgctgagcgatgctgacgccgatgccaatctcggcgggctaacgttacaaggaatggatgataacgccgcaggtttaggtgtcatgctggaactggctgaacacctgaaaaatacgcctaccgagtatggtattcgatttgtggcgaccagcggcgaagaggaaggaaaattaggcgctgagaatttactcaagcggatgagtgacaccgaaaagaaaaatacgctgctggtgattaatctcgataacttaattgttggcgataagctgtatttcaacagtggcgtaaacacacctgaagcagtaaggaaattaacgcgcgaccgggcgctggcaattgcccgcagccatggaattgccgccaccacaaatccaggtttgaataaaaactatccgaaaggcaccgggtgttgtaatgacgcagaaatattcgacaaagccggtattgctgtactttcggtggaagcgactaactggaatcttggcaataaggatggttatcagcaacgcgcaaaaacagccgcattccctgcgggaaatagctggcatgacgtaagactggataatcaacagcatattgataaggcacttcctggaagaatagaacgtcgctgccgtgatgttatgcggataatgctaccgttggtgaaggagctggcgaaggcatcttaatgggtttgaaatgattactcccttgcctgcaggaaatcaatgccaccagaaacagagtataaaaaagggtgcaggagaccaaaccatcacaattcagtacgcggggttttaccccgcgtggtggctacttcttcgattcgtaagcgagaactgccttaaactccataccacgttctctgatactcaactcacacaacgagtcgcctaccatcaacgtgaatcccagtactgtacaacacagtacgatgattgccacaagggcatattttgtcagcatgtcttgcctccctgcaaagaagagactaacatccgaattgcttaggttcgaacgtaggcctcaggttgatagaaatatcgcctggggcttttgtccatctggaacctcgcgaatgcttaacgccagacagcctcaagcacccaatgccattctatacctgttaattctccctgcgacgttctcgtttaaatgccggaatgctgctcgcaaaataaaaacgcccccatcatttctgacagaggcgtttaatttatccggcaatatttacccttcgtgtaatccacattccctttttaagccaaagaaacgcgtttcttcttccgccatgccgggttcccatttacgggttgtatgggtatcgcccaccgataaatatccttcatcccataatgggtgatatttcaggccatgtttttgcaggtactgataaatagttcggttatcccagtcgataatcggcagcactttaaatacgccacgctgaattgccagcaccggtaaattggcgcgactgccggattgttcacggcgcaggccagcaaaccaggtttgcgcattcagttctttcagcgcccggttcatcggttcgactttgttgatgtcattgtacttttcaatgccttcaacgccctgctcccacagtttgccgtagcgtgcttcctgccaggcggcgctttcggtagcacggtacactttcaggttgagcttgagtttgtccgttaactcgtcaataaagcggtaggtttccgggaacagatagccggtatcggtgaggatcactggaatatccgggcgaatctgattcaccagatgcagactcaccgccgcctgaatgccaaagctggaagaaagtacatattcaccgggcagattatccagcgcccaggctacgcggccttcagcgtccagtttttccagttgggcgttagtttccgccagcgccagaatccggtctacctttggcagttcgttcagggcgtttagatcgagtttggacataagttcctcactgtttgccttgcctgatgcaacgcttacacatcttatcaggccaacaagaccgggctgatggttaatcccataaatcgcgcgccggatcgagcaccgggcgaatgatgcccgcacgcaccgtaaagtcgccgaagccttcacccgcttcgcgctctttcgcccagcgccctatcagttcatcaagcgacgccaggatttccggctcggtgatgttttctttatacatccgtgggatacgtgtccccatacggttgccgccaagatgcaggttgtagcgccccggcgctttacccaccaggcccacttccgccagcatcgcgcgaccacaaccgttcgggcagcctgttacacgcatcacgatatgctcatcgctgacaccatgtttcgccattaaattatcgatgttgtcgataaaagacggcaggaaacgctccgcttccgccatcgccagcgggcaagtcgggaatgacacgcaggccattgagttttcacgctgcggcgtgacggcattcattaacccgctctctttggcgatcttctcgatcttcgctttctcgctttccggcactccggcgatgatcagattctggttcgccgtaatgcggaaatcacctttgtggatcttcgcgatctccagcaggccggttttcagcggacgccccggataatcaaggatgcgaccattttcgataaacagcgtcaggtgccagttatcatcaatgcccttaacccagccaatacgatcgccgcgtccggtgaactcatacggacgaatcggctcgaatttgatccccgcgcgacgttcaacttccgctttaaacgtctcaacccccacgcgctccagcgtgtatttggttttggcatttttacgatcggttcggttaccccagtcacgctgagttgtcacgacggcttccgccaccgccagcgtatgctccagcggcagatagccaaactcactcgccgtgcgggcgtaggttttcttgttgccgtgttcgatggaaagcccaccgcccaccagcaggttaaagcccaccagcttgccgttttcggcgatcgccacgaagttcatgtcgttggcgtgcagatcgatatcgttctgcggcgggatcactaccgtggttttgaacttacgcggcaggtaggtctgaccaaggatcggctcttcatcagtagtggcgactttttcctgatcgagccagatctccgcatacgcgcgggtacgaggcagcagatgttcagaaattttcttcgcccattcatatgcttccgcgtgcagctgcgactcgtaagggttcgaggtgcagagtacgttacggttcatgtcgttggcggtcgccagcgcatcaagaccgaccgagtgcagcatctggtgcaccggtttgacgttctttttcagaatgccgtggaactgaaacgtctggcggttggtcaggcgaatgctgccatagatggtgttttcaccggcaaatttgtcgatcgcctgccactgtttagtggtaatcaccccacccggcagacgacagcgaagcagcatcgcgtgacgtggttccagcttctgttcagcacgttcggcgcggatgtcgcggtcatcctgctgatacatgccgtggaagcggatcagcaggaagttatcacccttaaagccgccggtcagaccgtcgtttaaatcttccgcaatggtgccgcgcaggtagttgctttcaagcttcatgcgctcggcgtctgtcagttttccttcgaccactaaaggtcctggatgtttttcgctcattagtagacatctcgctgataacggcgctctacgcgcagctcacttaaaaattcatccgccgcttcggtgtccatgccaccaaattcggcaatcacttccagaagtgcctgctcaacgtctttcgccatgcgattagcgtcgccgcagacataaatgtgggcaccgtcattgatccagcgccacagctctgcgccctgttcgcgcagtttgtcttgtacgtaaattttttctttttgatcgcgcgaccaggcgagatcgatgcgcgtcagcacgccttctttgacgtaacgctgccattccacctggtagaggaaatcttccgtaaagtgtgggttgccaaagaatagccagtttttacccggcgcttcgtcggcagcacgctgctgcataaaggcacggaacggcgcgatgccggtgccagggccaatcatgatcaccggggtttccggattggttggcaggcggaagttgtcgttatgttcgataaagacgcggacttcaccctcttcttccacacgatctgcgaggaagctggaggcaccaccggcacgggcacggccttccacgtcgtaacgcaccacaccaacggtaacgtgcacttcgttctcgacttccgcctgcgaggaggcgatggaatacaggcgcggggtcagcgggcgcagcagattaatcagcgcttcggcatccagttgcgccggagagaaacgcaccatgtcgacaatcggcgtcgtcgcggcgtaatgctgtaatttcgctttatcgcccaccagcggcagcagcgtttcgctgcgggtaagcgtggcatagttctcaacaatgttggcggtgttgacggtcagttcgaagtgccactgtagcgcttcgttcagaggcaacgttttgccctcgacggtgacaggttcatcgcctttcagccacagcagttcgacaagttctttcaccagtgccggatcgttctgataccagacgcccagcgcgtcacccggctggtaacgcaggccagagtcacctaagtcaatttcaatgtgacgaacgtctttttcagagttacgcccggtaattttctggttaaccgaaaggctggccgccagcggcgcgtctttgctatacgggctggtgtggatttcatttaccgcgccagtagcgacggattgcgaaggcgccgcgacaggcgcacgcgatttaagcgcatcaaccacgcgggcgcgccactcgctggcagcagcctggtattcaacatcggcatcgacacggtctagcaggcgttcaccgcccagttccgccagcttactgtcaaaatctttcccggactggcagaaaaattcataagagctatcgccgaggctaaacacggcaaacgcggtgttttccagctttggcgcttttttggagaacaggaacttatgcagcgcgacggcttcttccggcggttccccttccccttgcgttgacgtcaccacgataagcagtttttcgctggcgatttgtttgaatttatagtcacccgcgttcaccagcttaacgttcagttttgccgctaataaatcatcgcgtaatgcttcagcaacccggcgcgcattgccggtttgcgaggcggagataatagttatacccggcatttctgcggcgggcgctggcgtcgctgcaagcgcagcaggctgctggttgagcacgccccagaaatagccagaaacccaggcaagctgggtaggagttaaatcggtcgtggccgcctgaaggcgtgccagttgctccgggttcaacggaagcaacgcggaaggtgggacctgtgtcgtcatgcgtcgttatgttccagtaagcaaagctgtttctgcgccctgtcagcgcccataaaacagaagagaaggtaaggttaacggggtgaacggtgtggattaaagacgggatagcgataactaataaccaaatcgactaacctgttttagcaatagtctttaacaacaaaatagattaaccaacccaatgaaaaacaaatgaatattgcccatcaataagataaatcagcgattttgcgcaacaaagtcgttttagataatgcgaaaaaacagcctttccggtactctacggcggttttatcgtcatgtagagaaattatgatgtccaccacgttatttaaagatttcaccttcgaagccgctcaccgcttgccgcacgtcccacaagggcataaatgtggtcgcctgcacgggcattcctttatggtgcgactggaaattaccggggaagtcgatccgcatacgggctggattatcgatttcgctgaactgaaagcggcgtttaaaccaacttatgagcgcctcgatcaccattatctcaatgatattccaggtctggaaaacccaaccagcgaagttttagcaaaatggatttgggatcaggttaaacccgttgtgccgctgttaagtgcggtgatggtaaaagaaacctgcaccgcaggttgtatctatcgcggcgaatgataagagtgtgtcggcggtcaatttcccttaagtaacgctatgttagggtgttgtgttctggatatctggggcatgacatggaagacgactgcgacattattattatcggtgccggaattgctggcaccgcttgcgcgttacgctgcgcgcgagcgggtttatccgttttgttactggaacgagcggagattcccggcagcaaaaatctttccggcgggcggctatacacccatgcgctcgcggaactcctcccgcaatttcacctgaccgcgccccttgaacgacgcatcactcacgaaagtctttctctgttaacgccagatggcgcaacgacgttttccagcttacagcccggcggtgaatcctggagtgtattacgtgcacgattcgatccgtggctggttgccgaagccgaaaaagaaggtgtcgaatgcatccccggtgcgacggtagatgcactgtatgaagaaaacggcagggtgtgtggtgtcatttgtggtgacgatattcttcgcgcccgttatgtggtgctggcagaaggtgccaacagcgtcctggcggaacgccacgggttagtgactcgtcctgctggcgaagcgatggcattggggatcaaagaagcgctggcgctggaaccatccgctattgaagaacgttttcatctggagaataacgaaggcgcagcgttgctgttcagcggcgggatctgtgatgacttacccggcggcgcatttctttatactaatcaacaaacgctctcgttagggattgtttgcccgctctcctcccttacgcaaagtcgtgttccggcaagcgagctgctgactcgctttaaaacgcatccggcagtgcgcccgcttatcaaaaacacggaatcactggagtatggtgcgcatctggtgccagaaggtggcctgcgcagtatgccggtgcaatacgccggtaacggctggctgctggtgggcgatgcgttgcgcagttgcgtcaataccggaatttccgtgcgcggtatggatatggcgctaactggcgcgcaggcggcggcacaaacgctgataagcgcctgccagcaccgcgagccgcaaaatctgtttccgctttatcatcacaacgtagagcgcagcctgctgtgggatgttctacagcgttatcagcatgttccggcgcttttgcaacgccctggctggtatcgagtgtggcctgggttaatgcaggatatttcccgtgatttatgggatcaggggaatacacctgttccaccgctgcgccagttgctctggcgtcatttacgtcgtcacggcttgtggcatctgacgggcgatgttatcaggagtctacgatgtctgtagcccgtaatctctggcgcgctgccgatgcgccgcacattgttccagctgactccgttgagcgccagacggcacaacggttgattaacgcctgtccggctggtcttttttcgctcacacctgaaggtgacttacgcgttgattatcacggctgcctggagtgtggcacctgccgtttgctgtgcgacgaatcaacactacaacagtggcgctatccgccttccggattcggcatcacctaccgctttggataaataacaaggataatttatgtccctcttacacctgctccgccagaatccggtgattgctgccgttaaagataatgccagcctgcaactggcaatcgactctgaatgccagtttatttccgtgttgtacggcaatatctgcaccattagtaatatcgttaaaaagattaagaacgccgggaaatatgcttttattcatgttgatttgctggaaggcgcgtcaaataaagaagtggtgattcagtttttgaaactggtaaccgaggcggacggaattatcagtaccaaagcctcaatgctgaaagcagcaagagcggaaggttttttctgtattcatcgactgtttattgttgattcgatttcgtttcacaacattgataagcaagttgcgcaatcgaatccggattgtattgagatcctgccaggctgcatgcctaaagtgctgggctgggtgacggagaaaatccgccaaccgctgattgctggcgggctggtgtgcgatgaagaagatgcgcgtaatgcgattaacgcgggtgttgtggcgctttccaccacgaatactggggtctggacgttagcgaaaaaattgctttgacgggataatcgtaacaagttgaatttggtgtgatttgtaggctgcacgccacatccgacattcagcgcctgatgcgacgcttgacgcgtcttatcaggcttacaagtccccagcccagaaccgtaggcaggatcatccggcagcacgttattggcaatctgcgtgaatggttgtcaccagtgcctccagcaccgctttccagtcatcaaccacgccaacatctgcctgtgaaaataccgccgcgctggcgtcatgattaatcgccaccacaaacttgctattgcgtacgcccgccattaacgctgctgcgccggaagcgccaacaacaatacacacctcaggtgccagcagatgtccggaaataccaatcactttttcggcatcaacgccaccgttcatcactcgtgcccgactgtagcccacttcgactcccatcttttctgccagcatagcgatttcctggttatctgcctctccgccctgccccaccaccagcacccgtctggcctcagctaatgggtcacgggtaacatttttcagattttcgacgctgataagccagtctggaagcgcgccggggacaatgttcagttgctgcatcccagagggcaacgtggcgtttttatctgctcccgcctgacgtgccagcgaaaggcatagcgggcgtttttctgtttgcaacgtcgccgttagcgcatttccccagtgagatttgcgcacgcttgcggttgatatatcgaatgaaatcacctggcagatactggcgccatgtacacgccaggccagtcgggtagccagttcatcgccaaacgcgcccggaggaaagaggacaacctccgcaggcgttcgttgccactgttccaccagcgcatccagcacctgttccgcaatcatcggctgtggttctatttgccagtgtgccagggtacaaccgctgaaatcctgcgccgccagccagctcgctattgcggcatggtcctgatttattgtcacaagtacgatattcatggctgcatcctttggcataaatagtactgccatagcttttgcgctttttctgctaccgtttgcccatcaatcagcgtcgctccgcgtcgttgctctgctcttgccagttgcagacactgcatcgctggcatttcggcagcaacagttttacggataatttctgctttccccgccgccattcgctgacgcattcccggtactggcaaggccacttcaccgcactgacgcacggcaatcaccgcaggcaagcgaacccggcaacagcgcagcccgttttcagtacgctgttcgagggtgataaacggcgcgtcgagagtgaaacgctccacctgggtgaagcagggccagcccagcatttccgccagcaaaaatggcgtttgcccattctgcccttcgctgctttggcagccagtaattatcagctccagcggattctggtactgccattcggcaatatggcgagcgacaaattccggcgcaaagcgcagatctgccgccgtctccagcaatacagcgtcctcaaacccaagagccatgagatagcgcagccagtgcaacgcccgttcatcccccatgctcaacgcggttaaagacatcgacgtaccgttttttctctgcgccaacagcagcgcggcggcagcctgttcatcagcaccgagtaaacttcgcagaagcgaaacatccggtccgctattaccctgagccgcctgccactctttttccgccagcattccggcatccggttcggctttaaacgctaacagaatgttcattcgcacctcctacatttcccgccgccaccagcgggagtgctttggtttctggtgcccatagccaggtcacaacaaaaccaaccaacaacactgccgccaggagcaataaggtggcttgcattccccactgcgccagcacccacggcagcaggccagtacttaccgccgcccccaaccgactcatggcggtggcaaaaccgacgcccagcgagcgaatgtcagtaggaaaactttccgcaggcaaaatgcccaccagattactgactgccgaaatggtggtgctgaagagaacaaaaagcagcagcgttaatgaactgccggaaggcaaacaggccattactaccagcgttgccgttagcagcaaaaaacttcccagtaaaaatctgcgatgcgctaacaagtgggtcaacactaaccctaataacgcgccaacaattaacaacgcattaagcatcaggctggcagtcagcgcatcttccagaccaatagtttgggcgatggtcggcagccaggtataaatcacaaaccatgggattacgaggcagacaaagaagacgctgttaaacgccgtgcgccgccagtagcgcgaagagaacaaggttttgatgtgtttatgggtcgccgttgccacttcatcgcccagtaaaacatgcgggccaaaatagcgatgaacgatagcgtgagcttctgcaaaacgcccctggcgcagtagccagcgtggcgattccggcgtgccccaacgtagcagcgtaatcagcaaggctggtaacgctgctgatgccagcagccagcgccaggcctccgggctttcggaaataaagtgatgtccggcaatacttgccagcacatagcctacggtccacaccacactgaatgcgcccagcaaaataccgcgatggcggcgcggggaaaattcagccagcaaggtgtgaccgactgagtaatcgcctcccagaccaatgccgatcaaaatgcgcaatccaataagatgctctggcgtggtggcaaaaaattgcaagaacgaagcgagcgtaatcagcataaaactgaaggtgaagattttttgccgcccgatatggtcggagatccaccccaaaaccaggctgccaagaaacaaaccaagtaacgccgagccgccgatcattcccgccataaacggcgtcagttgcatggcgggcgtaagctgaataatggcgtaaccaataacgccgaggacataaccgtcggtcaggtgtgcgccgaaagtgagcgcagcaattcgacagtgaaaacggttaagcggtaaatcatccattcgcaccggtgaagtgttcatctttaccccttcattgtccggtaataagaacggcttctcgcctgagaagccgaaaaggcaacgccccgtcatcgcggaacgctgcctgacacattatttttcaatcggatagatagtacccgtgttcataatgtcattaggatcgaactgctttttcagcccttccagcaacgcccacgcgctgccgtgttccagtttgctccagtgaacgcgatgtttaccgataccgtggtggtgcaccatcgaaccgccgagacgaatggtttcttcgcagatgattttgttgagcggattgtggtacttgtcgatttcctcttccggcttacagtcaacgacgttgtagtcgtagacgaagtacatgttggtgccgttctgatagctatgagaggagtgaccgcccagcatggtgatgtcgtcggcgtgcgggaactcggtacgaatacggttaataacgctttcgtagatttcgtgaatgcagctccagcagccggacacttcggtggtaaagcccatgttgccggttttgaggatctgcacacgttcggcagccactttatccggtccccagttcaggttgttaaaccaggtttcgatcagcttgctgtccacgcgctggcattgcgggtaacgggcaacgatttccgcaatcccttcgcccgtcgccttcgcaatgcgagagttaccttcagccataaagatcagtacacatttaccgtcggcaaaatgggtgaagtgttgggtgccatcttcagcatcatacaaacgagcaatcgacggacgatacccttccaccatgatttcacgcaggatgttgaagccggttttcatctcttccaggatatagccgtagaagagattgttttccggcgtaaatttgaagattttcactgtgacttcagtgatatagcacagtgcaccttcgttgccgatgatgatatgacgaatgtccgggccagccgcgcgacgtggcacgtttttaatgcgtgtgacggtgccatctgccagcaccgcttccagaccaacgaccatatcctcgattgcgccgtagagtgtggaaaactgcccgatactgcgggtcgccaccaggccgcccatctgcgccagcggctttgactgcggagaatgccccgtggtgtaacctttttcacgcaacgcgttttccagcacctccagcggaacgccacattgcgccgtggcctgcatattctcaatatcaatattaatgatttgattcatggcggagccgtcgagcaccaccgagttttccacaacggtttccagcccaccttcggtggcggaagcaccggtacgtggcacaccgttaattttgtgcgcattcataaaattcagcacacgggatacttgttctgtagaaccgagttttacgaccgctgccggaatcggcaaagtataaattccatgaatatccggaaatttacgaaaacggtcaatactgtttttctttaataccgtttcatcggtaattacgcgatctgcaccaacaatttcctttagctggtcgacaatcgctacgcgagataaagacatagtaattccttcctgataataaaaatggaatagttattaataagagaaaacagaaaccaccgttatgaattagcgcactaaataaccgccatcaaccactaataaatgtccgttgacataattcgatgccggacttgcgaggaatacagctgcacccattaaatcctgagtatcaccccaacggtttgccggaatatgatcaagaacacgctggttagtttctggattactacgggtcgccagcgtaatatcggttgcataataaccaggagcaataccattcacctgaatattatattggcctaattcatcgcaataggctttggtgaatccggcaagagcatgtttagtggcagaataagcaggtgaccattgaccacctaagtaagagaacaatgaacagatattaatgattttaccgcttttctgcgggatcataatttttgccgcttcgtagcttaactcgaatgcggcggtcaggttcacgtcaatcatcgggtcccagtcggcacgaccaaagtccagcaccttattcagcttacaaataccggcattgttaaccagaatatctacggtaccgaagcgctcacagcaggcagcgataatcttctgcggcgcgccttctgcggtgatatccacctgcataaaatcaacttcgacaccctgtttttcaatcatttccttagtttcgccgttatctttgacgaaactaggaataaagacatttgcgccagctttggccaacgccatggcaaatgcctggcctaaaccgctattcccgccggtaacaattgctgttttacctttcagggagaaaaaatccattgagaacgcattgagagattcgattgacatagttagctccaatttccgtaaggcaaaaaaaaagaaaggtaacttcccccgcgagagggaagttacctttctcattatctctggtaactggagataatttttagcataaggacataactgctaatgtgatcgtaatcacagtgtgatgttagtattgtcaaataatttaaaaaagcagaagcgtgattactctcacacaacacctctgctttccatgttatttcttattgcaattactagagacctgagaaaagtaatccacctgaaagggcggcttacttttctcttttttttgtctattacaaatgggaatacgatatgcaacacaactcatatcgccgttggataaccctcgcgataattagttttagcggcggcgttagtttcgacctggcttatttacgttatatttatcaaattcccatggcaaaatttatgggattcagcaataccgagataggtttaataatgagtacctttggtattgcggctattattctttatgcccccagcggcgttattgccgataaattttcacaccgcaaaatgattacttccgcgatgatcattaccggattactgggcctgataatggcaacatatccaccactgtgggtaatgctctgtattcaggtcgcctttgcgataacgacgattttaatgctgtggtcggtgtcgattaaagccgcatcgttgctgggcgatcatagcgagcaagggaaaattatgggctggatggaagggctgcgcggcgtcggtgtaatgtcgctggcggtgtttaccatgtgggtcttttctcgctttgcaccggatgacagcgccagcctgaaaacggtcattattatctatagtgtggtttacattctgctgggcattttgtgttggttttttgttagcgataacaacaatctgcgcagtgccaataacgaagaaaaacagtcattccagcttagcgacatcctggccgttttgcgcatcagcaccacctggtattgcagcatggtgatttttggtgtcttcaccatctacgccattctgagttactccaccaactatctgaccgaaatgtacggcatgtcactggtggcggcgagctacatggggattgtgatcaacaaaatcttccgcgcgttatgcggcccacttggcggcattatcaccacctacagcaaagtgaaatcccctacccgcgtggtccaaatcctttccatcatcggtttgctggcattgacagccctgctcgtcacgaactctaacccgcaatcggtcgcgatggggattggcctgattttattactgggattcacctgttacgcctcacgcgggctgtattgggcctgccctggcgaagcgagaacaccgtcttacattatgggcaccacggtaggtatttgttcggtgattggattcctgccggatgtcttcgtttacccgattatcggctactggcaagacaccctgcccgctgcagaagcctaccgcaacatgtggctaatgggcatggcggcgcttggcatggtgatcatctttacctttttgctgttccaaaaaattcgtactgctgatagcgcccccgcaatggctagcagcaagtaagccaggaaaattacaggagaaaaatcatgtcgaaaaaatacatcatagggattgatggcggaagtcagagcacaaaagtggtgatgtacgatctggaaggtaatgtggtttgcgaaggcaaaggcttattgcagccgatgcacacgccagatgccgataccgcagaacatcctgacgacgatttatgggcatcactatgttttgccagtcacgatttgatgagccagtttgccggaaataaagaagatattgtcggcattggcctgggctcaatccgttgctgccgtgcgttattgaaagccgatggtacgccagccgcgccgttgattagctggcaggatgcacgcgttacacgcccttacgaacacactaatcctgacgtggcctatgtcacctctttttcgggttatctgacacatcgcttaaccggcgaatttaaagataatatcgccaactattttggtcagtggccggtggattataagacctgggcatggagcgaagatgccgcggtaatggaaaagtttaatatcccccgccagatgctttttgacgtgcaaatgccgggcaccattcttgggcatatcacaccacaagctgcgctggcgacacatttcccggctgggctgccggttgtttgtaccaccagtgataaaccggtagaagctctgggagccgggttactggatgatgaaacggcggtaatttctcttggcacctatatcgcgttgatgatgaacggcaaagcactgccgaaagatccggtcgcgtactggccgattatgtcttctattccgcaaacattgctgtatgaaggttacggtattcgcaaaggcatgtggacggtgagctggctgcgcgacatgttaggcgagtcgttaattcaggatgccaaagcacaggatctttcaccggaagatttgctcaacaaaaaagcgtcttgcgtgccacctggttgtaatgggctgatgacggtgctggactggctgaccaatccgtgggaaccgtacaaacgcggaattatgatcggctttgattccagtatggattacgcatggatatatcgttcgatactggaaagcgtggcgctgacgctgaagaataattacgacaatatgtgtcatgaaatgaatcactttgcaaagcatgtgatcattactggcggcggttcgaacagcgatctgtttatgcagatttttgccgacgtgttcaaccttccggcacgccgaaacgccattaacggttgtgcaagtctgggggctgcgatcaatacggcggtaggtctggggctatacccggattacacaacggctgtcgataaaatggttcgcgtgaaagatatcttcataccgattgagagcaatgccaaacgctacgacgcgatgaataaaggcattttcaaagacctaaccaaacatactgatgtgatcctgaaaaaatcgtatgaagtgatgcatggggaattggggaatgcggattcgatccagagctggtcgaatgcgtaagtgaggaaggccgggcgggaaactgtccggcctgaacatacctgaatggttatccccgctgacgcggggaactcatatccggtttttgctggtgggccgcgccgttcggtttatccccgctggtgcggggaactctctaaacataacctattattaattaattattttttaagacagtcacaatctaccaactttacagtatcacacaaacaacacatccattatgttaaagagcacttaatccattgattaaaaagataaatatttacaatgactctattcaaactaaaatctaccaaactttaccgcaataattttcactccagcgaaaaattaacgccacagaatttgtagagaatgataatgattagtccagaatgggcaaaatggaggtttttcagagacgacaaagaatataaatgagtagaagtctttacagattccacccatttataacgcttataaatgtttaatcaggcaatattcaaatatttatgtgtctgcatcgacaaacgccagttgcgcgcaatgcaggtatcgatacataaacgcgtagcatcttccttctggctaattggctgaagtgcaatgactcgcggtttatcatcggtcagcgtcgccagcaattcatccagtgcttcaatatcacgtacgcgtcctactgggtgtttgatttcgttggctcgctccagggcttgtgacaacacttcatagccaccgcgcatatttagctttggtgatacggtaacccaggtattcggtgtgcagcgtacttcatgagtaccactggtttcgatctggcagctaaaaccgttcttttcgagcaggtcagtcagtggcagcaaatcatgaatgcaaggctcaccacccgtaatcaccacatgacgcgcggtgtatccctgacggccaatgacagccagcaaatcttcactgctcgccgccccccacttatcactctctttggtcttcgccagaatgctgaaaagggagacttcccgatcctcaagcttttcccaggtgtgtttggtgtcgcaccaggcacagccaaccggacatccctgtaaacgaataaaaatggcggggacgccggtaaagtaaccctcaccttgcagggtctggaacatctcgttaatcgggtactgcatagcattctctgtgaagtggataattgttaattattgcagatcctgccacaacaatcatgtcttattaacattctgttacaggcaggtttgatgcaaaaattggctcagatcattaagaataaaatgaagcggcgtattatgttttcaaggattaaatgaaagggatttaaacatgtttagaatattcatcgcgtttatatttattttcaatttatcaggttgcggttataacgatattcaaacctatgatgaacaggttaatgcctcctggtcagaagtattaaatcaatatcaacgtcgcaccgatcttattcctaatcttgtcgctagtattaaaggttactccagccatgaacaagaggtactagaagccgtaacattggcacgtagtcaggctaatcgcgccagtagcgatcttcagaaaactccgggagatgaacaaaaattacaagcctggcaacaggcgcaggcgcaggtgactcgcactctcgggcagttaacgattattagtgagcgttaccctcagttaaaggctcaagagctctatcaaaacttaatggtacagctcgaaggaagtgaaaatagaattgccgttgcgcgaggaagatatattaaagccattgaacaatataatgtcactatccgcaaattccccgctgtattaaccgcaaaggtcatggattacacaccaaagaaaaattatttgccggatgatgtcaccgcagtaagtaaagccccaacaatagattttagccagaatgctaatgctcattaagcggggacgttctatgcgaaattttatcttccttatagctttcttctgttcatctgtgtttgctacacaaattccagtacctgaatcacccaggtatgtgaatgacttaaccggcacattaacaaacagcgaagtaaacaccctgaccaaccagattaaagccctgacgcaaaaaaaccacgcacagttggtcgtgttagtggttgatacaacaggcgatgaaaccatcgagcagtacgcaacgcgggtattcgatagctggaaaccgggtgataaagaccgtgatgatggcgttctactgttagtcgcctggcaggatcataccgtgcgtattgaaatcggttacgggctggaaggtattattacggatgcacagtccgggaaaattattcgcaacagtattattccggcatttaaaaaaggcgacctggctggtggtttacaaaaggggatcaacgatattgaaagtcgcctgacggggaataattcagcaacgataacaccgaccgatcaccctttgccctttagcggttggtgggctttattagtctgggcgataatactgacgtttatttctgccagaggatatatcaaaacgttgggagtaatttgcttcgcagccattgtactggcctttgttttacctatagcaggtttcagcggaagctggggagtactcacaacattactctgcttcgccacaccgtttctggcagttgccatcgcttttacccccttcggcaaaaaggttcgggattcgatgcgtgatgccaaccagccatcacgccatacaagaagcaattcttcctcccactattcatcatcgtcatcctcttcattcgacaatgacaattttagcggtggtggcggttcatctggtggcggtggcgcttccgggcgctggtaacaaaaggaattgatatgcgtatttttctcttacttctgatgctatgcggttttcaggtattcgctgaacgattgccttcagtgactgacttaaccgggacattaacgacagaagaacaaagtgctttaaatcaacaattacagactctcgagcagcaaaaccacttccaggtggccgtgttggttacgccgacaacagggggcaaaaacattaaacttgcagcctcgcagagatacggggtatatcactggaaacccgttggagagaagcgatatggcgaaggtatcttaattctcgtcgtttggccggaagggctggcgtcaatgaagattggacatggactggaacagatgttgccgccggaacaagctgcgcaaattgttcgttaccatatgcagccagaattcgaaaaaaacaatctctttgctggattaacgggcggaattgaaagcatcgcacagtttacccatatcaaagcgaaccttagccctttggatgctttagccaatcatctgtttgctaatccgcaactttcgctgccatgccttgcctggacagtgctgatgatcgttgccatcattgtcctctggcgatttaccagccgtccaggacctggcatatggatgatatcaatgattacacctacggtctggtttttctgctttcaggacgatgtcatcattcggcgggtgtcggtcgtttgttttagtttatttttcgcagcaatctgctggcagcgtctcgcagtagtttttaatatgtgccgcgtatttcctatgatgctggccccaaaaaataaaaacgctaaagtgaaaaaacaaaagaagactccgcaatttcgtgaatcaggacgaaattcattgtttgtcgtgatgctgataattattgtgggatggtgcctggtgttcgccagtaataaagatattgcattcatctcaacaattattgggttaattgatcattttatcggcccaataaccattgctggcatcgttctgctgatcattgtggccaaatttactggcaatcttaagctggggtcaggagaaaaaagcaacaggaaaacggggaatcgtaatgctcatgctcattctcgctcttcgtcgagaaattctttccgcggtggtggcggttcttcaggaggcggcggttcatccggccgttggtgatcgtaatgcgcttaatctttattctattcactttgtggtgccttcctgggcttgcccagcaaattgctgtgccggaactgcgccaacaggtgaccgatattactggtacgttaagcacttctgaacaacaatcactgacacagcaactgcaggatattacacataaaacacgggcgcaggtcgctgtattagtagtgccgtccatcggagacgattccattgaacaatatgctacaagggtttttgacaattggcgtttaggagatgccaaacgtaatgatgggatactgatcattgttgcctggtcggatcgtactgtccgcatccaggtaggttatgggctggaagaaaaggtaaccgatgctctggctggcaatatcatccgtagcatcatgatacccgcctttaaaaaacaaaaattagctaagggattagagttagctataatcgctttgaataaccaactcacttcacaacaccaatattcgtctaatccttcagaaagtgaatcagcgtcttccagtgatcattactactttgctattttttgggtatttgcagtgatgttcttccctttctggttttttcatcaaggcaataatttttgtcgggcatttaaaagcagtgtttgtatttcaacagtctatcttatagatttattcctgttctccgatcaaactttttccattgctgtattttccttcttttttgctttcaccatcattatggtctttacctggttatgtgtcccacagaaaaaagcatcaggtagaagttatcattcagacagcggcggttctggtggcggctcaagtggcggcggatttagcggaggtggcggttcttctggcggtggcggcgcgtctggccgctggtaactcagccataaaaaatgccagcccgaaggctggcatttttaaatcagataaagtcagacttatgcctggcctttgatctctttacgaccgttgtacggtgctttttcgcccagagcttcttcgatacgaatcagctggttgtatttagcaacacggtcagaacggctcatggaacccgttttgatctggcctgcagcagtaccaacagccaggtcagcgatggtagcatcttcagtttcaccagaacggtgagagataactgcagtgtagccagcgtctttcgccatcttaatagcagccagggtttcggtcagagaaccgatctggttgaatttgatcaggatggagttagcgatgcctttttcgataccttctttcaggatcttggtgttggttacgaacaggtcgtcaccaaccagctggattttgtcgcccagaactttggtctggtatgcgaaaccgtcccagtcagattcgtccagaccgtcttcgatggaaacgatcgggtactgtttggtcagttcttccaggaagtgagtgaattcttcagaggtgaatgctttgttgccttcgccagccagaacgtatttaccgtctttgtagaattcagaagctgcgcagtccatcgccagagtgatgtctttgcccagttcatagccagcagctttaacagcttcagcgataacagccagagcttcagcgttggaacccaggttcggcgcatagccaccttcgtcaccaacagcagtgttcatgcctttcgctttcagaacttttgccaggtgatggaaaacttcagaacccatgcggatggcttctttcacagttttcgcgccaaccggctgaatcatgaattcctggatatcaacgttgttgtcagcgtgctcaccaccgttgatgatgttcatcatcggaaccggcatagagtatttgcccggagtgccgttcagttcagcgatgtgctcgtacagcggcatacctttagcagctgcagcagctttggcgttagccagagatacagccaggattgcgttcgcgccgaatttggatttgttttcggtgccgtccaggtcgatcatgatcttgtcaatgccagcctgatctttagcatctttgccaatcagcgcctgagcgatcgggccgtttaccgcagcaacagctttggttacgcctttacccaggaaacgggatttgtcgccatcgcgcagttccagagcttcacgggaaccagtagaagcacctgacggagcagctgccataccgacgaaaccaccctccagatgtacttcggcttcaacagtcgggttaccacgggagtcgatgatttcacgaccgatgatttttacgattttggacattaggttttcctcaagtcactagttaaactgaaactccagacaaacaacgcgtacccagggtacgcgttgccgttctaacttttttacttacttcgcctgacgtttctggaactcgctggcggctttcacaaagcctgcaaacagcgggtgaccatcacgtggagtagaagtaaactccggatggaactggcaagccacgaaccacggatgattcggaacttcgatgatctcgaccaactgatcatccccggaacggcccgcaacgcgcagacctgcatcttcaatctgtttcaacagcatgttgttgacttcgtaacggtgacgatgacgctcaacaattgtcggcgcattgtacagctggcgaaccaggctatcgtcaaccaactggcactgctgtgcgccgagacgcatggtaccgccgagatcgctcttctcgctacgaacttcaacgttgccgttttcatcgcgccactcggtaatcagcgccacaaccgggtacttacagtctggcacaaattccgtagagttggcgttctccatgttggcaacatggcgagcgtaatcaattaacgccacctgcatacccaggcaaatgcccagataaggaatattgttctcacgcgcaaaacgcgcggtcgtaatcatgccttctacgccacgatagccgaaaccgccaggtacgaggattgcgtccagacctttaaggatttcaacgccgcgcgtttcaacatcttgtgaatcgatcagtttgatgttgacgctgacacgattcttcagcccaccgtgtttcagtgcttcgatcacggatttgtatgcatccggcagctcaatgtatttgccgaccataccaatggtgacttcacttaccggattcgcttcttcgaagataacctgttcccattcggacagattcgcttccgggcagtttaagctgaatcgtttacaaatataatcgtccagcccctgagatttcaacaggcccggaattttatagatggaatcgacgtctttcagagaaataaccgctttttctggaacattacagaacaatgcaatcttcgcacgttcgttcgccggaacggcgcgatctgaacgacaaatcaggatatcaggctggataccgattgaaagcagctcttttacagagtgctgagtcggtttggttttgacttcaccagacgctgccatgtacggcaccagcgtcaggtgcataaacagggtgtgctcacggccaatttcaacagccatctggcgaatcgcttcgaggaacggcagggattcgatatcacctacagtaccgccgatttcgaccagtactacgtcatgaccttcgccgccttccagcacgcgctctttgatagcgttagtgatgtgcggaataacctgtacggttgcgccgagatagtcaccgcggcgttctttacgcagaacgtcagagtagatacgacccgtggtgaagttgttgcggcggctcattttggtacgaatgaaacgctcgtagtgccccaggtccaggtcggtttcagcgccgtcttcagtaacgaacacttccccgtgttggattgggctcatagtacctggatcgacgttgatgtacggatccagtttcatgatggtcacattgaggccacgggcttcaagaatggctgcgagggaggctgcggcaatgcctttacccagagaggatacgaccccgccggtcacaaaaatatagttcgttgtcatgctgaacctgagaagttaggttgaaaagacgatggaataaccaggacgggaaagcagtatacccgaacatgacctgtgccacaaactttcattatccctcctcttcgccagcgcactattgaaatcaggagtgagaaaatagcccctttggggtaaatgtttttgacgcaaatcaagcgcttgtcatttaaaaaatgacacaaatcgcgcttgaccgcgtaattcccttagagatcaatttcctgccgttttacctgttgccagacttcttccattgtttcgaggtcaacacctgtcatttccagtccacgcgcggcaacaatacgctccacttcgcgaaaacgacgctcgaatttttcgttcgctttttgcaatgcgatttccgcttttgtccctaaatgacgagccagattgaccgtggcaaacagcaggtcacccatttcctcctccagtttagcctggtcgacaacagcctgccgcgcctcgtacatcacctcgtcgatctcttcgtagactttatcgactaccggatcaagcgtcgtccagtcgaaaccaacgttggcgcaacgtttctggattttttgcgcacgcattaaagccggtaaactacgaggaatatcgtccagcgccgaatgctgcgctttctgcgcgcgctcttcggttttgatttgctcccaacgggcaagcacttcactactattttcggcagaactgtcagcaaaaacatgcggatggcgacgctctaatttatcgctaatagcagcgcaaatatcattaaagtcaaagcgcccttcttcctgagccatttgtgcgtaaaacaccacctggaacagcagatcgcccagttcaccgcgcagatcgtcaaaatcttcacgggcgatggcgtccagcacctcgtaggtttcttcaagggtgtaaggcgcaatggtggcaaatgtctgctctttatcccacgggcagccgttttccgggtcgcgcaggcgctgcatgatggtgagcaaacggtcgatttgattcattgaattgtcctgaaaattgcgggtccgtcagatgtaataccttcgagtaaaagatatcgctggatacggctgacgccatatccagctatgtaagattaactcccgtgcaaccgacgcgcgtcgataacatccggtacctggttgagtttacccagcacgcggcccagcacttgcaggttgtaaatctcaatggtcatgtcgatggtcgccagttgctgtttggtgtcgctacggctggcaacgccaagcacgttcaccttctcgttggcgagaatggtcgtgatatcacgtaacaacccactacgatcattagccaccacgcggaccaccagcgaatatccggcggagtagctctcaccccataccgcgtcaacaatgcgttctggcgcatgggagcgcagttccgccagttgttcgcaatcggcgcggtgtactgaaataccgcgtccctgagtaatgaaaccaactatttcatcaccaggaataggctgacagcagcgcgcgatgtggtgcatcaggttaccgacaccttcaaccaccacacgaccgttatctttactgcggttttgcggcgtgtagcttttttgctgaagttgcttcagcgcggcggcgtcctgctcttcggcactcggcttattaaattgcgattgcaggaagttcaccatctgattgagacggatatccccgccaccaatcgccgccagcaactcgtcgacatcattgaagttgtaacgcggcagcagatgtttttctgcttctttcaggctgatccccagatgttccagctcgtcgtcaaggatttgccgcccagccagaatgtttttgtcacggtcctgtttacggaaccaggcgtgaattttcgaacgcccacggctggttgtgacgtaaccgaggtttgggtttaaccagtcacggctggggttcggctgtttctgggtgataatttcaatctggtcgcccatctgcagctggtaggtgaacggcacaatgcgcccgccaatttttgccccgatgcagcggtgtccgacatcactgtggatgtggtaagcgaagtccagcggcgttgatcccgcaggcaaatcaacgacatcacctttcggcgtaaagacgtacactcggtcgtcaaagacctgactacgtacttcgtcgagcatttcgccggaatcagccatctcttcctgccacgcaatcagtttacgcagccaggcaatccggtcttcatgtcccgaacgtgcgccgccagcagccgcgccctctttatatttccagtgcgcagcaacacccaactctgcatcttcatgcatctgtttggtgcggatttggatctcaacggttttgccacccggccccagaaccacggtatgaatggactgataaccgtttggtttcgggttagcgacgtaatcgtcaaactcatccggcaggtggcgatagtgagtgtgcactatccccagtgcggcataacaatcctgtaaacgctcggcgacaatacgtaccgcacgcacatcaaacagctcatcgaaggcgaggttctttttctgcattttgcgccagatgctgtagatgtgtttcggtcgaccatacacttcagctttaacaccttcagctttcatctcagcgcgcagatggccgacaaactcttcgatatagtgttcgcggtcgagacggcgttcatgcagcagttttgcgatgcgtttgtattcggtcgggtgcagataacggaagcagtaatcttccagctcccatttcagttgcccaatcccaagacggttcgccaacggcgcgtagatattggtgcactcttttgccgccagtacgcgttcatcttccggcgcatcttttacttcgcgcaggtgagcaatacgctccgccagtttgatgaccacgcagcgaaaatcatcgaccatcgccaataacatccggcgaacgttatcgacctgttcggaggaaacagaatcagtgtgcgtcgctttcagctggcggatcgccgccatatcacgcacgccgtgaataaggttaacgaccgacttaccgacgctctcacgcagcacatcttcgctgactacgttggcatcagccagagggaacagcagcgccgcccgcagcgtgtcaatgtccatacttaatgtcgagaggatctccaccatctcaacaccacgccacaataacagactggcatccggatgcccctgcgtctgttgcagacaatacgcccaggtttcggctaagcactcacacgacttctggctggtaatacccagacttgcgatccatttttccggatcaaattcaccagccttattgatatgtgcacttcttaccgcaaccatcgtcctctcctttagggaccagacctgccgaaatcggcaaatcgtaactatttaacgcgcgagaaaagtaccatcgattccagatgtcccgtgtgtgggaacatatccagcatcgccagtcgcgcaatggtatatcctgcttttaataacgcttcgctatcccgagccagcgttgcagggttacaggatacataaactatacgaataggttccagttttataatttgctgcataacacctgcggcacctgctcgcgccgggtccaacaacactttatcgaagccgtttttcgcccacggctgctttgtgacatcttcttcaagattttcgtgataaaacgtcacattctgtaagccattaagacgcgcattctgctggcctttttccaccagcgccggaacaccttctacacccaccacactggcagcttgtgtcgccaatggcagtgtaaagttgcccataccgcagaacagatccagtacgcgatcttcaggttccacatccagccattccaacgcacgcgctaccattttctggttcacacccgcattgacctgaataaaatcgcgcgggctaaaagttaagcgcaacccatttgagtcataccagggcatctcaccagagacggtttcgagtatctcactatcgggggcgagatacagatccaggccttcagaatgcgaaaagcattccagtttttcgcgatctgccgaacttagcggtgcggtatggcgcaaaatcattagcgtgccgctggttgcctgtaccagttcaacatgaccaagatggcgcatagcttgtaagctgcccaggcatgccctgactttgggcagcaatgcttcaagttggggcactaaaatggggcattgtttcacgtcgacaatgtcactggagcccgctttgcgaaaccccatctgaagttgctgtgttttcggtaagtagttcagacttaaacgcgcgcgacggcgatagccccagggaacatcggcgatcacttcagagacttcgtgtttcattaatcgggcgagtgccgcacttttgcttcgctgctgtaaatccacactggcgtgttgttgctgacagccgccgcatacgccaaaatgaggacagcgtggcgtttcgcgttccgggctatcgcttaaccggcgtacgactttagcgcgggcatactgttttttatcttcagtaacagtaacttccgcgttttcctgcggcaataatccggggataaataatgttttgccgttatgtcgcgccacaccctgaccaaaagagtcgaggtcgttgactgaaacggttatgatctgacgcgtcgtcgtgcgtcgttttgcagagtagaattgcgccattggcgagactttctcaatttaacagtgtgaccttaattgtcccataacggaactccatgaccaactacagcctgcgcgcacgcatgatgattctgatcctggcaccgaccgtccttattggtttattgctgagtatctttttcgtcgtgcatcgctataacgacttgcagcgtcaactggaagatgccggtgccagcattattgagccgcttgcagtttctactgaatatggcatgagtctgcaaaatcgcgaatctatcggtcagttaataagcgtactgcatcgtcgccattctgatattgttcgcgcgatttcggtttatgatgaaaataaccgactctttgtcacctccaattttcatcttgatccctcatcaatgcagctcggcagcaacgtgccgtttcctcgccagctcactgtcactcgtgacggcgatataatgatcctccgcacgccgattatttctgaaagttactcccccgacgaatcgcccagtagcgatgccaaaaatagtcaaaatatgctgggatatattgcgctggagctggatcttaaatcggttcgcttgcagcaatataaagagatctttatttccagcgtgatgatgctgttttgtatcggtattgcgcttatttttggctggcgcttaatgcgcgatgtaaccggtccgattcgcaacatggtgaataccgtcgaccgcatccgtcgcgggcaactcgacagccgggtggaaggatttatgctcggcgagctggatatgctgaaaaacggtatcaactcgatggcaatgtcgctggcggcttatcacgaagagatgcaacacaatatcgaccaggcgacgtccgatctgcgtgagacgctggagcaaatggagattcagaacgttgagttggatctggcgaaaaagcgcgcccaggaagcggcgcgtattaaatccgagtttctggcaaatatgtcacacgagctgcgtacaccactgaatggtgttattggctttacccgcctgacgctgaaaacagaattaacaccaacgcagcgcgatcacctgaatacgattgaacgttcggcaaataatttgctggcaattattaatgatgttctcgacttctcgaaactggaagccggtaagctgattctggaaagtattccattcccactacgcagcacgctggatgaagtcgttaccctgctggcacattcttctcacgataaagggctggaactgacgctcaatattaaaagcgacgtgcctgataacgtgatcggcgacccactacgattacagcaaatcatcactaacctggtagggaatgcaattaaattcaccgagaatggcaacattgatattctggtagaaaaacgtgcgctgagtaataccaaagtgcaaattgaagtgcagattcgggataccggcattggtattcctgaacgcgatcaatcgcgcttattccaggccttcagacaggctgatgccagtatttcccgccgtcatggtggcaccgggctggggctggtgattacacaaaaactggttaatgaaatgggcggcgatatttcgttccatagccagccgaatcgcggttcaactttctggttccacattaatctcgatctgaacccgaacattattatcgaagggccatccacccagtgcctcgctggtaagcgcctggcctatgtcgaaccaaactccgcagcagcacaatgcacgctggatattttaagtgaaacgccgctggaagtggtttatagcccaacgttctccgcgctgcctcccgcgcattacgacatgatgttattaggcatagcggtgaccttccgcgagccgctaacaatgcaacatgagcgattagcgaaagcagtatcgatgaccgatttcctgatgctggcacttccttgccatgcacaagtcaatgctgaaaaacttaagcaagatggtatcggcgcgtgtctgctgaaaccattaacacctacgcgcctgttgcctgccctgacagaattttgtcatcacaaacaaaacacgcttttgcctgtaaccgatgaaagtaagctggcaatgacagtcatggcggttgatgacaaccccgctaacctgaaacttatcggcgcattgctggaagatatggtgcaacatgtggaactttgcgatagcgggcatcaggcggttgaacgggcgaaacagatgccgttcgatttaatcttaatggatattcaaatgccggacatggacggcattcgggcatgtgagctcatccaccagctcccgcatcagcagcaaacgccggttatcgcggtaacggcgcatgcgatggccgggcaaaaagagaaactgcttggcgcggggatgagtgattatctggccaaaccgatcgaagaagagcgattgcataatttgctgttgcgctacaagcctggcagcggtatttcctctcgcgtcgtgacgcccgaagtcaacgaaattgtggtcaacccgaatgcgaccctcgactggcaactggcactacgccaggcagcaggaaaaaccgatttagcgcgcgatatgctgcaaatgttactcgatttcctgcctgaagttcgcaacaaagttgaggaacagctggttggagaaaacccggaaggcctggttgatttgattcataaactgcatggcagttgcggctatagcggtgtaccgcgtatgaagaatctctgccaactgatcgaacaacagctacgtagcggtactaaagaagaagatttagagccggagctgctggaactgttggacgagatggataatgtagcgcgcgaagccagcaaaattctcgggtaatggacgtcttgtcgagtagcaaccggatttttatgacgctggtttcagattggtgacaagtgcctgtgtttatgccggatgcggcgttaacgccttatccggcctgcaaaaccaattaaattcaatgaattaaaaaatgatgtagccctgatacgtagcgcaacaggcaattttgcgtttggcatcagtctcaaaccggctccagatagagccggttttggttttctgtcttaacgcaccatgcacggacgcttgttatcgaacgtccagccggggatcaggtactgcattcccatcgcatcgtcacgcgcgccaagcccgtgtttctgatacagctcgtgcgctttcatcacttgatccatatcgatttctacacccagccccggtttttctggcacctgaaccagaccgcctttgatctctaacggttctttggtcaggcgctgattaccttcctgccagatccagtgcgtatcaatcgcggtgattttacccggtgcggcagcggcaacatgggtaaacatcgccagggaaatatcgaagtggttgttggagtgtgaaccccaggtcaggccaaattcatgacacatttgcgccacacgtaccgaaccttgcatcgtccagaaatgcggatccgcaagcgggatatcaacggattgcaacgagagcgtatggcccatctgccgccagtcggtggcgatcatattggttgcggtcggcaggccagttgcgcgacggaactctgccatcacttcacgcccggagaaaccttgctccgcaccacacggatcttctgcataagccagcgaacctttcaggtatgtaccgattttaatcgcttcgttcagcgaccaggcaccgttaggatcgagcgtaatacgcgcctgcgggaaacgttgcgccagtgccacaatagattcggcttcttcttccccggccagtacaccgcctttcagtttgaaatcgttgaagccatatttttcatacgccgcttccgccaggcgcaccaccgcatccggcgtcatcgcttcttcatgacgcaggcgataccagtcgcatgagtcatccggctggctttgatacggcagcggtgtagctttgcgattaccgacgaagaacagataaccgagcatttcgacttcgctacgctgttgaccatcgcccagcagcgatgccacgtttacccccagatgctgccccagcagatccagcattgccgcttctatcccggtaactacatgaatagtggtacgcaaatcaaatgtctgcaaaccgcgcccaccggcatcacgatcggcaaaagtattacgcaccagcgtcagaacgtttttgtattcacccagcgttttacccaccaccagcggaatcgcatcttccagcgttttacggattttctcgccgccgggaatttcccctacgccagtgtgaccggaattatctttgataatcacaatattacgcgtgaagaacggtgcatgtgcaccactcagattcatcagcatactgtcatgacccgccaccgggatgacctgcatttcagtaacaacaggcgtcgtaaattgagaactcatatttatgtcctttttcagaatcaatgacggccgaaaacgggacgtttacggtcaaaggtccagccggggatcaggtactgcatcgggcctgcgtcgttacgcgcaccgccaggcagacgtttataggcctcatgtgccttttgtacctgttcccagtccagttccacgcccagaccgggcgcatcaggaacggcaatttttccgtttttaatctccagcggatttttggtcagacgacaatcgccctcctgccaaatccagtgggtatcgatagcggtaggattacccggtgccgccgcgcccacatgggtaaacatcgccagagagatatcaaagtggttattagaatggcagccccaggtcagcccccagtcgtcgcaaagttgcgccacgcggactgcaccggaaagcgtccagaagtgcggatcggcaagtggaatatctaccgcattgagcatcaccgcatgacccatttcgcgccagttggtggcgatcatgttggtcgcgacgggcaagccggtcgcccgtcgaaactccgccatcacttcacgaccggagaaaccctgctcagcgccgcacgggtcttccgcataggtaagaacatcatttagccctttgcacagagaaatggcttcatcaagcagccaggcaccattgggatcaacggtaatccgcgcatcagggaagcgtttcttcaatgtacggacagtgtcgatttcttgctcgccaggtaacacgccacccttaagtttgaaatctttaaagccatagcgatcctgtgaggcttccgccagacgcacaacggcttcgctgttcatcgctttctgatgccgcaactgataccactcatggttgcccggcgtattttccagataaggaagatcggttttggtccgatcaccgatataaaacagataaccgagaacggtaatagcatcacgttgcttgcctggccctaacagttcgcagaccggaacattcagcgcctgacctaacaggtcaagcaaggcggcttccagcgccgccacggcattaacgcgcaattcaaaagtccaggcacctttgccgaaggtatcaaaatcggctgcctgattacctttatgcacctgctgaaccactttattcaggcgcgcaacttcctggcccagcaccatcggaatagccttgaccagtgtttgataaatcacctctccgcccggcgcttcaccaatgccggtatacccggcattatcggtgagtaccacaatattgcgggtgaaatatgcgttatgtgcaccaccaatattaagcaacatgctgtcatgtccggcgaccggaatgactttcatatcagtaataacaggactggattgtgtcgtcatcttattgccccgcgacaggtttcagctcaatacgcttgatatcgcccaccagcaccaggtagctgagtaccgcgattaaggcatgaacaccaacataaatcagcgccccattaaaggagccagtcgtgccaacgatataaccaattgcgattggcgtgacgatgccagaaatgttaccaaacatgttaaacaggccaccggaaagaccgctgatctcttttggcgcagtatcagccattacagcccaacccagcgcaccgatccccttaccgaagaaggccagcgccataaagccgatgatcatccactcaacgttgacgtagttgcagaacaccatcaccatcgacagcaacatgcccatcacgatcggtgttttacgcgcaatgttcagtgaacccgtgcgacgcatcagccagtcggaaataatcccccccaacacaccgccgataaaaccgcaaaccgccggaacagaagccacaaagcctgctttcagaatcgacatcccgcgcgcctgcaccagataaaccgggaaccaggtaataaaaaagtaagtcagggcgttgatacagtactgaccgatataaacgccgatcatcatccgtgacccgagcagctgtttgatctgcccccacttcacgctgaacggcactttaactttggtgttttgctgatccatattgatcagcgcgccacccgtggcgatgtactccagctctttctgatttacgcccggatgttgatttggctcgtggatgactttcaaccagataaagctgatgacaatgcccagaccgcccataaagaagaagacgtgtgaccagcccacttcatgagtcaaccagcccataatcggcgcgaagataaccgttgcgaagtattgggcggagttaaaaatcgacaccgccgttcccctttcctgcgccggaaaccaggccgcaacaatgcggctgttgccagggaaagagggcgcttcagcaagcccgaccaggaagcgcagtgtaaacagggcaacgataatgccgaatccactaaagatatcgacgaagccttgcagcaaggtaaacatcgaccagataaagatcgaccagaagtagacgcgttttgaaccaaaacgatccagcaaccagccaccagggatctgcccgataacatacgcccatgagaaggcagagaacacatagcccattcccacgggatcaaggccgatatctttggccatttccgaaccggcaatagaaagcgtagcgcggtcgccgtagttgaaggatgtgacgataaacaacatcaccactatccagtaacgagcattcgtgcgtttttccacactgctcgcagcctgacttaaagaactcattgttgcactcctgaaaattcgcgttagccacgctcactctggactgcgacatcgcaggaaatcagaggtgacgtagggtgtttttgccgtttttataggtcgttcgccgaatacggcgcgtgtttatatctggcaatagcagtataaaaagcgcgccatagcggctcaccgtgcaacaacacaacattaatgcgttcaatgaggcccgattttggcattagccctggacggtggaatccacttcacggaaatgaaaacaagaacaagaaaggaagggttaaaacgaagaaataaagaagagtatgaaatggatcgcttgactccaggcaaacgccagtaaaaatccgcgctatgaagcagtttttactggcatttgcctgaaaagattcgattcagcaccgctaaaacggcatttaccgctcgctgaacatatcaggacaacatcgtgccccaatgttcaacccacggatttgattccgtttccggttccgggttctcactggcgtcaatcaacagcatttcgccaacccgctgagcgctctgttcctgcaacaaggcatcgaactgtttgccgccattgcagaaattcacataactactgtcgccgagcgcaatcacgccataacgcagattcggctggaagcccagactatctttgattccctgaaagagtggcacaatgctatcaggaaggtcgccctgcccggtcgtggacgtaaccaccagaacatacttatcctgatagggcagccagtcgcttaattcaggatcttcaaataccgttgctttgtggccctgcgcggtcagaatcgcttccgcttcttcggccactaacagtgaattcccgtacatggtgccgacaaaaataccaatttccgccataccgttttctccctggattaggaacttatctctccatcctgacccgatggcgcactgaactcaaccctttcattttcaggaagcagaccgcgccagccaaattgtgataatgcctgcatccaggtgtcgtccaggcccgcgtgaatagccagcggctcgccagtaaaaggatgcgtcaatgacaactgactggcatgcagcattaaccgctgaaggccaaaatgctcagcgccgctgcgattctggcgtaaatcaccatgtttgctgtcgccaataatcgggtgccgcaaatgggcaagatggcgacgaagctggtgcttgcgtccagttttcggctccagttccaccaggccgtagcgcgtggtcgggtaacgtccggtcgctaccggcatttctacggtcgccagaccgcgataatgcgtcactgctggctgcgggcctttatcttcgcgggcaaatttatcagcgattttgtccagttcttccaccagtggataatccagcaccgcttcttccatcaaccagccacgcacaatcgcatggtaacgtttctggatttggtgctgttcaaactgttgtgccagcagccgtccggcttcgctggataatcccatcaacaacacaccagaagttggtcggtccagacgatgagcagtaaaaacatgctggcctatctggtcacgcacggtttgcatgaccactactttctcgtcgcgatccagccagctgcggtgaaccagccagccggagggtttatttaccgcaaccagccattcatcctgatagagtatttccagcattagctcgcatcatccgcaaaaagagcatccagtttctccagctcagccaaaataagcgcgcgttgcggatgatcagtcgccagcgccatttcataatagggcgcaacagcaaaagcgcccggtaacggctggttgttatctaacaaatcgtgcattcgcgggatcagcacccactgcaaccactccagtggttccatggtgtccataaagaacggttgagtactgttaaattgatgcggcaggggttcatcgtttcgccagtgctgatgttcacgcagtaacgcttcaagcgcctgcaactggagacgaacgcggtcatgagtggtcataaagcaacctcaataagaaaaactgccgcgaagaatagcaggaataaaaaaagggagcactgtattcacagtgctcccggttcgtttcgcagcattccggctacttttgttgctccctgctcatccttgacaacttttcctctggccttgcggccaatcgttcatcctgaactattgcttcctgctcacaccaccccgatgtgatacttcatcctgaagtgttcctggccttcctgacccaccgaatcatcctgaccggttctcattctccatcctggaggtgtcctttaacgcgtcctgcgtcatcctcttcgcttcatccagaagcctttccctgaaacaccatcctggtgtgtccttcagaagtgtcatcatcctgatgttcacttcgtttgaagtggtttactgaatttggccacctgaacagaggtgatatgctcacctcagaacaacacaggtgccataatgaaaaaaagaaatttcagcgcagagtttaaacgcgaatccgctcaactggtcgttgaccagaattacaccgtggcagatgcagccagcgctatggatgtcggcctttccacaatgacgcgatgggtgaaacaattacgtgatgagcggcagggaaaaacaccaaaagcctcccctattaccccggaacaaattgaaatccgtgagctcaggaaaaagctacaacgtattgaaatggaaaatgaaatattaaaaaaggctaccgcgctcttgatgtcagactccctgaacagttctcgataatcgggaaactcagggcgcgttatcctgtggccactctctgccatgtgttcggggtccatcgcagcagctacaaatactggaaaaaccgtcctgaaaagccagacggcagacgggctgtattacgcagccaggtacttgaactgcatggcatcagccacggctctgccggagcaagaagcatcgccacaatggcaacccagagaggctaccagatggggcgctggcttgctggcagactcatgaaagagctggggctggtcagctgtcagcagccgacttaccggtataaacgtggtggtcatgaacatgttgctatccctaactaccttgaacggcagttcgccgtgaccgagccaaatcaggtgtggtgcggtgatgtgacctatatctggacgggtaagcgctgggcgtacctcgccgttgttctcgacctgttcgcaagaaaaccagtgggctgggccatgtcgttctcgccggacagcaggcttaccatgaaagcactggaaatggcatgggaaacccgtggtaagcccgtcggggtgatgttccacagcgatcaaggcagtcattatacgagcaggcagttccggcagttactgtggagataccggatcaggcagagtatgagtcggcgtggaaactgctgggataacagcccaatggagcgcttcttcaggagtctgaagaacgaatgggtgccggcgacgggctatgtaagcttcagcgatgcagctcacgcaataacggactatatcgttggatattacagcgcactaagaccgcacgaatataatggtgggttaccaccaaacgaatcggaaaatcgatactggaaaaaactctaactcggtggccagtttttgttgaccacttcagttgtctgactccctgtcgacgaagatagaatcgtctttttctcgaagtcttacaaggcgcttacagacaatgccttaaggaaaatttcatatgaaagttaagaattaacaagcaacatgttgtttttaaatgagaataacgattcttatctttttaagtattcgcttatttcctggcgatctcctacagagtctgtaagagatctctcacaaccagatggggtatttggattacagaagaggcttaagttgattaaggaattccgcaagatttgaggctaaatgcgtccgtttacgtgttcctagcgtctctttgcacacttcaccggagagattacacaccgagatgacctctaactcttcttccagcgtcgcgataaatagcgtgggcggcagttttagccttttctgagtcaccagatgaccaatcagattttcctgcacccgacggaagtcgtcttcactccaggtttgcagcaatgtcagtttgatatcgccaaactgcgcgtgcatatccccggcaaactgagtcgtataaaaggtatgaatcgtgggttgtatcacaatatcaaaagcgcgttcaaccgcgtttacattttgttccccggtaaacggctggggttgccagtatacggcatcttcggtagttgaaataatgcacggtgaaggaacgccgtacagttcctcacttaacggccagcttttatgctcttcatgccacgcatcgcagtagcgtgcagtaaaatctttcagggcttgtgcggtcaaatcgtccactaatttctctcttcacttaaaccagatacacttgtcgtttagtttatctggtttatgacggtgaaacatgtcttcttatgcaaaccatcaggcacttgcgggcctgactcttggaaaatcaaccgattaccgggatacctatgacgccagcctactgcaaggcgttccacgcagcctgaatcgcgacccgctgggtctgaaagcggataacctgccttttcacggtacggatatctggacgctgtatgaactttcctggctgaatgcgaaaggtttgccgcaggtcgctgtcggtcatgttgaacttgattacaccagcgtaaatctgattgagtcgaagagttttaagctctatctcaacagttttaaccagacgcgttttaataactgggatgaggtgcgccagacgctggagcgcgacttaagcacttgcgcccagggtaaggttagcgtggcgttatatcgtcttgatgaactggaaggccagccgataggtcatttcaatggcacctgcattgatgaccaggatatcactatcgataactatgaattcactactgactatctggagaatgccaccagcggtgaaaaagtagtggaagagacgcttgtcagccacctgctgaaatcaaactgcctgatcacccatcaaccagattggggttcgatccaaattcagtatcgtggacgccaaattgacagagaaaaactgctgcgttacctggtctctttccgtcatcacaacgagttccacgaacagtgcgtggaacgcatctttaatgacctgttacgcttctgccagccagaaaaattgagcgtttacgcacgttatacccgtcgtggcggtctggacattaacccgtggcgcagtaataacgattttgtcccatcgaccacaagactggttcggcaataaattttttctcaattttgcgtgctggattcacgcagaaggttgtgaaaggtcagcaggcagggctattgtaatcaaagggaatgacgatattcgtcccataaggagtttttcttgattacacatattagcccgcttggctccatggatatgttgtcgcagctggaagtggatatgcttaaacgcaccgccagcagcgacctctatcaactgtttcgcaactgttcacttgccgtactgaactccggtagtttgaccgataacagcaaagaattgctgtctcgttttgaaaatttcgatattaacgtcctgcgccgtgaacgcggcgtaaagctggaactgataaatcccccggaagaggcttttgtcgatgggcgaattattcgcgctttgcaggccaacttgttcgcggttctgcgtgacattctcttcgtttatgggcaaattcataacaccgttcgttttcccaacctgaatctcgacaactccgtccacatcactaacctggtcttttccatcttgcgtaacgctcgcgcgctgcatgtcggtgaagcgccaaatatggtggtctgctggggcggtcactcaattaacgaaaacgagtatttgtatgcccgtcgcgtcgggaaccagctgggcctgcgtgagctgaatatctgcaccggctgtggtccgggagcgatggaagctccgatgaaaggtgctgcggtcggacacgcgcagcagcgttacaaagacagtcgctttattggtatgacagagccgtcgattatcgccgctgaaccgcctaacccgctggtcaacgaattgatcatcatgccagatatcgaaaaacgtctggaagcgtttgtccgtatcgctcacggtatcattatcttccctggcggtgtgggtacagcagaagagttgctgtatttgctgggaattttaatgaacccggccaacaaagatcaggttttaccattgatcctcaccggcccgaaagagagcgccgactacttccgcgtactggacgagtttgtcgtgcatacgctgggtgaaaacgcgcgccgccattaccgcatcatcattgatgacgccgctgaagtcgctcgtcagatgaaaaaatcgatgccgctggtgaaagaaaatcgccgcgacactggtgacgcttacagctttaactggtcaatgcgcattgcgccagatttgcaaatgccgtttgagccgtctcacgagaatatggctaatctgaagctttacccggatcaacccgttgaagtgctggctgccgacctgcgccgtgcgttctccggtattgtggcgggtaatgtaaaagaagtcggtattcgcgccattgaagagtttggtccttacaaaatcaacggcgataaagaaattatgcgtcgtatggacgacctgctacagggttttgttgcccagcatcgtatgaagttgccaggctcagcctacatcccttgctacgaaatctgcacgtaatctcccctcccccggtgacgtttgttgccgggttttctcgtttttggtcacttactcatcaactcatttcatttgttatatgaatgtttcctaccaccctcacgcgacaaatatcaccacagttaatatgtcatacaatttatgttgaaacgcaaacgtttccctattttcataaaccacattttatcgccatgaaaaagaaattatcgccatgattaactaaaagtattgattttttcagttcaacctacatatattgcgcgccccgtaagaagtcagatgtcgtttaatgggtaaatattgcccttaaattctcttttacttttgatttacagagtaaagcgttgggattatctatcttccaagtagattattgtatttgggatcaagatcactgatagatacataacttgtgtgtatctttccgccctcaaattattacggtggaaaatgattaagccatcgccgatagacagatttcatttttacggtcaggcaccttcccgggctgaactggctaaaagctgaattatttgcattcctccaggagaaatagatggaaacgactcaaaccagcacgattgcgtcgaaagactctcgtagtgcctggcgcaagacagacaccatgtggatgctgggcctttacggcacggcaatcggcgcgggcgtgctgttcctgccaatcaacgctggtgttggcggtatgatcccgctgatcatcatggctatccttgcgttcccgatgacgttttttgctcaccgcggcctgactcgcttcgtactgtctggtaaaaacccgggcgaagacatcaccgaggttgtagaagaacactttggtattggcgcaggtaaactgattaccctgctctacttcttcgctatctacccgatcctgctggtttatagcgtggcaatcaccaatacagttgaaagcttcatgtctcaccagctgggtatgacgccaccgccgcgtgcgattctgtcgctgatcctgatcgtgggtatgatgaccatcgttcgcttcggtgagcaaatgatcgttaaggcgatgagtattctggtattcccgtttgttggcgtactgatgctgctggctctgtacttgatcccgcagtggaacggcgcagcactggaaacgctgtctctggacactgcatctgcaaccggaaacggtctgtggatgacactgtggctggcaattccggtaatggtgttctcgttcaaccactctccgatcatctcttctttcgccgttgcgaagcgtgaagagtacggcgatatggcagaacagaaatgctcgaagatcctggcattcgcacacatcatgatggtgctgaccgtaatgttcttcgtcttcagctgcgtactgagcctgactccggcagacctggctgcggctaaagagcagaacatctcgattctgtcttacctggctaaccactttaacgcgccgatcatcgcgtggatggctccgattatcgcgattatcgctatcaccaaatccttcctcggccactacctgggcgcacgtgaaggcttcaacggtatggtgattaaatctctgcgtggtaaaggtaagtctatcgaaatcaacaagctgaaccgtatcactgcgctgttcatgctggtaacgacctggattgttgccaccctgaacccgagcatcctgggtatgattgaaaccctgggcggcccaatcatcgcgatgatcctgttcctgatgccgatgtacgcaattcagaaagtaccggcaatgcgtaaatacagcggtcacatcagcaacgtattcgttgtcgtgatgggtctgattgcaatctccgcaatcttctactctctgttcagctaagtcctttcgcgccgctttcgggcggcgcttcctccgttttaacgcgatgtatttcctatgattagcgtattcgatattttcaaaatcggcattggcccttccagttctcataccgttggaccaatgaaagcgggtaaacaatttaccgacgatctgattgcccgtaacctgcttaaagacgtgacccgcgtggtggttgacgtgtacggctcgctctctctgaccggtaaaggccaccacacagatatcgccataattatgggtctggcgggtaacctgccggataccgtggatatcgattccatccctggttttattcaggatgtgaatactcatggtcgcctgatgctggcaaacggtcagcatgaagtggagttcccggttgatcagtgcatgaacttccatgccgacaacctttctctgcatgaaaacggtatgcgcattaccgcgctggcgggcgataaagtcgtttacagccagacttattactctatcggcggtggctttattgttgatgaagaacattttggtcagcaggatagcgcaccggttgaagttccttatccgtacagttcagcagccgatctgcaaaaacattgtcaggaaaccgggctgtcactctctggcctgatgatgaaaaacgagctggcgctgcacagcaaagaagagctggaacagcacctggcgaacgtctgggaagtcatgcgtggcggtattgagcgcggtatttctaccgaaggcgtgttacctggcaaactgcgcgttccacgccgtgctgcggcactacgccggatgctggtcagccaggataaaaccaccactgacccgatggcggttgttgactggatcaacatgtttgcactggcagtgaacgaagagaatgctgctggcggtcgcgtggtgactgcgccgactaacggtgcgtgcgggattattccggccgtgctggcgtactacgacaagtttatccgcgaagtgaacgctaactcactggctcgttacctgctggtagccagcgccattggttctctttataagatgaacgcctcgatttctggtgccgaagtcggctgccagggtgaagtcggcgtggcgtgctcaatggcggcagctggtctggcagaactgttaggcgcaagcccagcgcaggtatgcatcgcggcggaaatcgccatggagcacaacctcggtctgacgtgtgacccggtcgccgggcaggtacaggtgccgtgcatcgagcgtaacgccattgcggcagtgaaagcagtaaacgctgcacgtatggcgctgcgccgtaccagcgagccacgcgtctgcctcgacaaagttatcgaaaccatgtacgaaacaggtaaagatatgaacgccaagtaccgtgaaacgtctcgcggcggcctggcaatgaaaatcgttgcctgcgattaatcgctctccagaggcctctttttgcgaggcctcttcccgatttctcatccagccatagcctgttctggcatcgaatgttacccttatcgcctgatctttaagggggttatcgtggctgttcatttgcttattgtcgatgcactgaatcttattcgtcgcattcatgccgttcagggttcgccctgtgtcgaaacctgccagcacgcgctcgatcagctcattatgcacagccagccaacccacgcggtcgccgtttttgatgatgaaaaccgcagtagcggctggcgtcatcagcgtttaccagattacaaagcgggtcgaccgccaatgccggaagagttgcacaacgagatgcctgcattacgcgccgcctttgagcaacgcggcgtcccgtgctggtccgccagcggcaacgaagccgatgacttagccgccacgctggcggtcaaagtgacacaggccgggcatcaggcaacgattgtttcgacagataaaggctactgtcagttactttcaccgacattacgtattcgtgattacttccagaaacgttggctggatgcgccatttatcgataaagaatttggcgttcaaccgcagcagttgcccgattactgggggcttgcggggatcagcagttcaaaggtaccgggtgttgcagggatcggaccaaaaagcgccacacagctactggtcgagtttcagagtctggaagggatatatgagaatctggatgcggttgccgaaaagtggcgcaaaaaattagaaacccataaagagatggcgtttctgtgccgcgatattgcccgcttacaaaccgatttgcatatcgacggcaatttacagcaattgcggttggtaaggtaacggcgtgccggatgcaaacgattatcaacacattgaatttaatgcacttatatgccggataagacgcggctagcgtcgcatccggcattatcacatcagcgcatttaccaggcggtatggtaaagctctacaatatcctcaagcgttgcttcacgcgggttgccaccggtacaaacatcatccagtgccgcctgcgccagtgccggaatgtcttccttgcgtacaccaacatcacgtaaatgtggcggaataccgacatcacggttgagagcaaacaccgcttcaacagcggcattacgcgcctcttccaggctcataccttccactttcacgcccataacgcgcgcgatatcgcggtacttctcaccggtaaagtcagcgttatagcgcatgacatgcggtaacaggatggcatttgcaacaccgtgtggcgtgttgtaaaacgcgcccagtggatgcgccataccatgcaccaaccctaacccaacattcgagaatcccatacccgcaacatactgcccgagcgccatttcttctccggcatccttatcaccagcaaccgatcctcgcagcgccccagcaatgatttcaatcgctttaatgtgcagcgcatcggttagcgcccacgcgccacgggtaatatacccctcaatagcatgagtgagcgcatcgacacccgtcgcggctttcagcgctggaggcataccatccatcatgtcagcgtcaataaacgccacctgcgggatatcatgcggatcaacgcaaacaaacttgcgccgtttctcttcgtcagtgatcacgtagttaatggtcacttctgccgcagtgcctgctgtggtggggattgccagaatcggtacactgggtttattggtcggggaaagcccttccaggctacgcacatcggcaaactccgggttgttgctgataatgccaatcgctttacacgtatcctgtggagaaccaccaccaatagcgatcaggtaatccgcgccgctattctggaatacatcgagcccttctttgacgacagtaattgttgggttaggtactacgccgtcgtaaatcgcccatgccagtcctgccgcatccatcttatcgatcactttcgccaccacgccgcattgcaccagcgttttatcggtgacgatcagcgccttctgataaccacggcgtttcacctcatcggttaaagacccaacagccccccgaccaaaccatgccgtttcgttcagaatcattctgttagccatcatccttctccttgttgctttacgaaattactcttcaatccgtaacccgtaggttttgaatttctccagcactacggcaatctcttcatcgctcagcactggcaccgggtccgtaatcgccagggtcgtcaggtaaagttgtgccagcacttcaacttcatgcgccagccataacgctttctccagattcgcctcacaagcgataagcccatgatgttgtaacaaagttgccttacgatttttgagagccagcgcaacatgttcagaaagttcgcgtgttccaaaggtcgcataaggcgcgcaaggaatagaattaccgccagccgccgcaatcatgtagtgaatcgcggggatcggtcggttaagaatggaaactgccgtacaatgaacggcatgattgtgaacaaccgcgttggcatccggtctgctttgataggccgccatatggaaacgccactcgcttgaggggagttttccttcctcatgtttgccgttgccatcaataaagacaatatgcgactccgtcagtttttcatatggaatacctgtaggcgtaatcagcatcccatcctgataacgtacactgacgttacccgctgtcccctggttcagccccaggcgagtcatttccaggcaagtgtcaataatctgacgagcaagtttatttcgttccattagctacctctctctgattcaaaacagggcaataatgttgttcctttcacactattgaattagccgtttaattacccaccatcttcttcctgattaaccagaaagaaattcacaagcttatattttgtgacctggttcaactaatcacagtaaataactgcaagttctctttttataactccattaaaaatgaccgctcttaaaaatatttatcaaaacggtcatttttctactcctccctgccaggaatgcccgttttcggcacaaacaattaatacggtcatctggtttgtgttttttatgatttattttctgaaacgggcatgaaatttcgattattaaagtgatggtagtcacataaagtcaccttccggctaataagtgtgaccgccgtcatattacagagcgttttttatttgaaaatgaatccatgagttcatttcagacaggcaaatattcactgatatgaagcccgaactcgctggttttgcacttttgaaaacataaccgattacgtgcttaagcttctgaacctaagaggatgctatgggaaacacatcaatacaaacgcagagttaccgtgcggtagataaagatgcagggcaaagcagaagttacattattccattcgcgctgctgtgctcactgttttttctttgggcggtagccaataaccttaacgacattttattgcctcaattccagcaggcttttacgctgacaaatttccaggctggcctgatccaatcggccttttactttggttatttcattatcccaatccctgccgggatattgatgaaaaaactcagttataaagcagggattattaccggattgtttttatatgctttcggcgctgcattattctggcccgccgcagaaataatgaactacaccttgtttttagttggcctatttattattgcagccggattaggttgtctggaaactgccgcaaacccttttgttacggtattagggccggaaagcagtggtcacttccgcttaaatcttgcgcaaacatttaactcatttggcgcaattatcgcggttgtctttgggcaaagtcttattttgtctaacgtgccacatcaatcgcaagacgttctcgataaaatgtctccagagcaattgagtgcgtataaacacagcctggtattatcggtacagacaccttatatgatcatcgtggctatcgtgttactggtcgccctgctgatcatgctgacgaaattcccggcattgcagagtgataatcacagtgacgccaaacaaggatcgttctccgcatcgctttctcgcctggcgcgtattcgccactggcgctgggcagtattagcgcaattctgctacgtcggcgcacaaacagcctgctggagctatttgattcgctacgctgtagaagaaattccaggtatgacagcaggctttgccgctaactatttaaccggaaccatggtgtgcttctttattggtcgtttcaccggtacctggctcatcagtcgcttcgcaccacacaaagtcctggcagcctacgcattaatcgctatggcactgtgcctgatctcagccttcgctggcggtcatgtgggtttaatagccctgactttatgcagtgcctttatgtcgattcagtacccaacaatcttctctctgggcattaagaatctcggccaggacaccaaatacggttcgtccttcatcgttatgaccattattggcggcggtattgtcactccggtcatggggtttgtcagtgacgcagcgggcaacatccccactgccgaactgatcccggcactctgcttcgcagtcatctttatctttgcccgtttccgttctcaaacggcaactaactgaacatattttccgaataaagtgaggaatcagtaatgaaaaaaatcagcttaccgaaaattggtatccgcccggttattgacggtcgtcgcatgggtgttcgtgagtcgcttgaagaacaaacaatgaatatggcgaaagccacggctgcactgctgaccgagaaactgcgccatgcctgcggagctaccgtcgagtgtgtcatttccgatacctgtatcgcgggtatggctgaagccgctgcttgcgaagaaaaattcagcagtcagaatgtaggcctcaccattacggtaaccccttgctggtgctatggcagtgaaaccatcgatatggatccaacccgcccgaaagccatttggggctttaacggcactgaacgtcccggcgctgtttacctggcagcggctctggcagctcacagccagaaaggcatcccggcattctccatttacggtcatgacgttcaggatgccgatgacacatcgattcctgccgatgttgaagaaaaactgctgcgctttgcccgcgccggtttagcagtcgccagcatgaaaggtaaaagctatctgtcgctgggcggcgtttcgatgggtatcgccggttctattgttgatcacaacttctttgaatcctggctgggaatgaaagtccaggcggtggatatgaccgaactgcgtcgccgtatcgatcagaagatttacgacgaagccgaactggaaatggcgctggcctgggctgataaaaacttccgctatggcgaagatgaaaataacaaacagtatcaacgaaatgccgagcaaagccgcgcagttctgcgcgaaagtttactgatggcgatgtgtatccgcgacatgatgcaaggcaacagcaaactggccgatattggccgcgtggaagaatcacttggctacaacgccatcgctgcgggcttccaggggcaacgtcactggaccgatcaatatcccaatggcgacaccgccgaagcgatcctcaacagttcatttgactggaatggcgtgcgcaaaccgtttgtcgtggcgaccgaaaacgacagtcttaacggcgtggcaatgctaatgggtcaccagctcaccggcaccgctcaggtatttgccgatgtgcgtacctactggtcaccagaagcaattgagcgtgtaacggggcataaactggatggactggcagaacacggcatcatccatttgatcaactccggttctgctgcgctggacggttcctgtaaacaacgcgacagcgaaggtaacccgacgatgaagccgcactgggaaatctctcagcaagaggctgacgcttgcctcgccgctaccgaatggtgcccggcgatccacgaatacttccgtggcggcggttactcttcccgcttccttaccgaaggcggcgtcccgttcaccatgactcgtgtcaacatcatcaaaggcctgggaccggtactgcaaatcgcggaaggctggagcgtggaattgccgaaggatgtgcatgacatcctcaacaaacgcaccaactcaacctggccaaccacctggtttgcaccgcgcctcaccggtaaagggccgtttacggatgtgtactcggtaatggcgaactggggcgctaaccacggggttctgaccatcggccacgttggcgcagactttatcactcttgcctccatgctgcgtatcccggtatgtatgcacaacgttgaagagaccaaagtgtatcgtccttctgcctgggccgcgcacggcatggatattgaaggccaggattaccgcgcttgccagaactacggcccgttgtacaagcgttaatacatgactccctgatgtgatgcccggtcgctccggctaccgggcctgaacaagcaagagtggttagccggataagcaatgttatccggctatattgcaggagcgattatgaaacaagaagttatcctggtactcgactgtggcgcgaccaatgtcagggccatcgcggttaatcggcagggaaaaattgttgcccgcgcctcaacgcctaatgccagcgatatcgcgatggaaaacaacacctggcaccagtggtctttagacgccattttgcaacgctttgctgattgctgtcggcaaatcaatagtgaactgactgattgccacatccgcggtatcgccgtcaccacctttggtgtggatggcgctctgctagataagcaaggcaatctgctctatccgatcattagctggaaatgtccgcgaacagccgcggtaatggaccatattgaacggttgatctccgcacagcagttgcaggctatttctggagtcggagcctttagtttcaatacgttatataagttggtgtggttgaaagaaaatcatccacaactgctggaacgcgcgcacgcctggctctttatttcgtcgctgattaaccaccgtttaaccggcgaattcactactgatattacgatggccggaaccagccagatgctggatatccagcaacgcgatttcagtccgcaaattttacaagccaccggtattccacgccgactcttccctcgtctggtggaagcgggtgaacagattggtacgctacagaacagcgccgcagcaatgctcggcttacccgttggcataccggtgatttccgcaggtcacgatacccagttcgccctttttggcgctggtgccgaacaaaatgaacccgtgctctcttccggtacatgggaaattttaatggtccgcagcgcccaggttgatacttcgctgttaagtcagtacgccggttctacctgcgaactggatagccaggcagggttgtataacccaggtatgcaatggctggcatccggcgtgctggaatgggtgagaaaactgttctggacggctgaaactccctggcaaatattgattgaagaagctcgcctgatcgcgcctggcgcagatggagtgaaaatgcagtgtgatttattgtcgtgccagaacgctggctggcaaggcgtaacgcttaataccacgcgggggcatttctatcgcgcggcgctggaagggttaaccacgcaattacagcgcaatctacagatgctggaaaaaatcgggcactttaaagcctctgaattattgttagtcggcggaggaagtcgcaacacattgtggaatcagattaaagccaatatgcttgatattccggtaaaagttctcgacgatgccgaaacgaccgtcgcaggagctgcgctgtttggttggtatggcgtaggggaatttaacagcccggaagaagcccgtgcacagattcattatcagtaccgttatttctacccgcaaactgaacctgaatttatagaggaggtgtgaaatgctgaaaacaatttcgccgttaatttctcccgaactattgaaagtgctggcagagatggggcatggagatgaaattattttttccgatgctcactttcccgcccattcgatgggaccgcaggtgatccgcgctgatggcctgttggtgagcgacttgctccaggcgattatcccgttatttgagctggacagttatgcaccaccgctggtgatgatggcggcggtagaaggtgacactctcgatcctgaagtagaacgacgttatcgtaatgcgctttcactacaagccccctgtcctgacatcatccgcatcaatcgttttgcgttttatgaacgggcgcaaaaagcctttgcgatcgttatcacaggcgaacgagcgaagtacgggaatattcttttaaaaaaaggggtaacaccgtaatctcataccggtacgcccgcatgacgcgggcggttatcgaatgatggggtgaaaaatatgaaagcggcacgccagcaagcgatagtcgacctgctgctgaaccataccagcctgaccacggaagctctctctgaacagctaaaggtcagtaaagaaaccattcgtcgcgatctcaatgaattacagacgcagggtaaaattctgcgcaatcatgggcgcgctaaatatatccaccgtcaaaatcaagacagtggcgatccctttcacatccggctgaaaagccattatgcgcataaagcagatatcgcgcgcgaggcgctcgcgtggattgaagaagggatggtgatagccttagacgccagttcaacctgctggtatctggcacgccagttgcctgacatcaacatccaggtcttcaccaatagccatccgatttgccatgaactcggtaaacgcgaacgcattaaactgatcagttccggcggcacacttgagcgcaaatatggctgttacgtcaatccctcgctgatttcccaacttaaatcgctggaaatcgatctgtttattttttcttgtgaagggatcgatagcagcggcgcactgtgggactccaatgccatcaacgctgattacaaatcaatgttattaaaacgtgccgcgcaatcgttgttattgattgataaaagtaaatttaatcgttcaggggaagcccgcatcgggcatctggatgaggtaacgcacattatttctgatgagcgccaggttacaacttctttggtaacagcctgacggaaagggtagcaggccggagacgacgccccggccttacctgttatcgctcgtcgcgacgaccacccaccgcagcccagatacggcggacgtgcaccgtcacttcttcgcgatcgtgatacaactgccgcgcctgaatctgagcatttatgccatgttcatcaagctgtgcctgaatatacgccagattgtgtgacacttcttcgtagcgttttttcatcggcagtttgagattgaagatagtttcacggcaccagccattaaccagccactgcgccattaatgccgcaactttcgccggtttttcaaccatatcgcataccatccaggagatattgctgcgtgtcggacggaatttgaaaccgtcttcccgcagccacgtcacctgcccggtatccatcagactttgcgccatcgggccgttgtcgacggaataaacccacatgttgcgcttcaccagttggtaggtccagccgcctgggcaagcacctaaatccaccgcccacatcccgttcgccaggcgttcatcccactcatccgcgggaataaacacatgaaatgcctcttccagtttgagcgtggaacgactcggcgcatctgccggaaatttcaggcgcggaatgcccatatagaacggcgaattattgctgctgtatgagtaaccagtatagcaacagcctggtgcaataaagaatacatgcacaaccggacgcttcggcgtttcatagttcgccagcacccccgcatcacgcaaggcagcgcgtagcggcacggtgaatttacggcagaatttcagcaactctttgctttcgttggtatcggcaacttcaacacgcagttcaccgcccttctctactacgccctgtaacatgccgacaatgggggtaatacgatcttctggcggcaaatgctgcaggagttcccccactacaaaccactggcgggcaaaaattaatgaactgaacggcagctcacggattaacttatcgccatcatcaggttgataacattcataaatgacataacccgcattctctttcacgcgggcaaaaccgaaaatttcccgctggccggctttatcggtaatttctgcggcgcactctttttcaaagcccggacggcacagcaatacaaccttattcatgacttacgcccttgcgctttaaacggatagcaccaactaacattaacgcccagcccgcaaggaagctcacgccgccaaccggtgtgacaaacgcccacaaacgcagatgggacagcgccaggcaataaaggctgccgctgaacagcaccgtgcctaacgcgaggaaaacgctactccagtaaaaccagatactgatgcgacgctgcattgccaccgccagacctaagatcgccagcgtatgaaacgcctggtattcgaggccggtctggatccagcccatctcaacggcccccatggttttacttaacacatgcgcgccaaaagcgcccagagctacaaaaatgaagccgctaatggcggcgaaaatcagcataaaacggctggtcatggtcgtaccctacgtaaattattgttcataacgaaagcggaatttttcttgttcagcagcggctttcgccaggatccattggcgaaaggcggctattttacccagttctgcctggctgtcatgacaaaccagataaaaagcgtttttactgaccagaacatcattaaacgggcaaacaagacgtccggcctcgatttcagattgcgccatcacgttatttgccagcgccactccctgcccgtggatagccgcttgcagcaccatggcgctatggctaaaaattggcccttgctgaacgttgatatgatttaaccccaactgtcgggtatatgtctgccagtcacggcgtgacgcatcatgtaataacgtatgtttagccagatcttccggggtcttcaagggtttttcgccagtcagcagtagcggcgagcacaccggcaataaatattcggcgtacagtttttccacccgtagccccggccagttgccccgaccataaaatatcgccacatcaacatcatccgccagcttatcttcctgacgatcaaccgcctggattcgaacgtcaattcccggataagctgaattaaagctggaaagtcgcggaaccaaccaatgaatggcgaaactggggagtaaactgaccgtcaacgcccccttagcgctacgggcctggagtttacgcgtcgcttcggttaattgcgaaaatatctctttgatatcgaggaaatagctttgcccttcctcggtcagcaggagtgaacgattacggcggcggaacagttttagccccagaaaatcctcaagagacttgatttgatgacttactgcggcctgggtcacaaaaagctcttctgctgcgcgagtgaaacttaaatggcgtgctgcggcatcaaaaactcgtaaggcatttagcggtggtaatcgtttagacatggcttttaaactttgatgttaaatgaatttaacaattagattacactatgtaacctattagtttttttaatctgagccattataaattgtccgttgagcttctaccagcaaatacctatagtggcggcacttcctgagccggaacgaaaagttttatcggaatgcgtgttctggtgaacttttggcttacggttgtgatgttgtgttgttgtgtttgcaattggtctgcgattcagaccatggtagcaaagctaccttttttcacttcctgtacatttaccctgtctgtccatagtgattaatgtagcaccgcctaattgcggtgcttttttttaccttgcgatcgcgaattactgatccagttcgaccatctctttcacgtcggtacggttgatctgctgtttgttgccattagcgtctttatacgaaatcataccggtatcgttatcagtctgtggtttgccgtcagagacgatggtacgtccgtcattggtgtgcatcacatagttcgaaccggaacaggcgctcagggcaaaagtcagcatacaggcagaaataattgcggcagtctttttcatcatcttctccttaaagcgattaataaatcttaatagtattgattaacaggctaaaattaacgcctaacactattcagcatatgttactgacgcggcttcgccaggatatccagataattctgatggttagcactctccttgtatcaaagtgaattttgcgtcacgatcggtgcatcaagccgaggagtaccatgaacgtttttaatcccgcgcagtttcgcgcccagtttcccgcgctacaggatgcgggcgtctatctcgacagcgccgcgaccgcgcttaaacctgaagccgtggttgaagccacccgacagttttatagcctgagcgccggaaacgtccatcgcagccagtttgccgaagcccaacgcctgaccgcgcgttacgaagctgcgcgggaaaaagtggcacaattactgaatgcatcggatgacaaaaatatcgtctggacgcgcggcaccactgaatccatcaacatggtggcgcaatgctatgcccgtccgcgtctgcaaccgggcgatgaaattattgtcagtgtggcagaacaccacgccaacctcgtcccctggctgatggtcgcccaacaaacgggggccaaagtggtgaaattgccgcttaatgcgcagcgactgccgaatgtcgatttgttgccagaactgattactccccgtagtcggattctggcgttgtgccagatgtcgaacgtcactggcggttgcccggatctggcgagagcgattacttttgctcattcagccgggatggtggttatggttgatggtgctcagggggcggtgcatttccccgcggatgttcagcaactggatattgatttctatgctttttcaggtcacaaactgtatggcccgacaggcatcggcgtgctgtatggcaaaccagaactgctggaagcgatgtcgccctggctgggcggcggcaaaatggttcacgaagtgagttttgaaggcttcacgactcaatctgcgccgtggaaactggaagcaggaacgccaaatgtcgctggcgtcataggattaagcgcggcgctggaatggctgacagattacgatatcaaccaggccgaaagctggagccgtagcttagcaacgcttgcagaagaagcgctggcgaaacgtccaggctttcgttcattccgctgccaggattccagcctgctggcctttgattttgcgggtgttcatcacagcgatatggtgacactgctggcggagtacggtattgccctgcgcgccgggcagcattgcgctcagccgctactggcagaattaggcgtaaccggcacactgcgcgcctcatttgcgccatataatacaaagagtgatgtggatgcgctggtgaatgccgttgaccgcgcgctggaattattggtggattaatgacaaacccgcaattcgccggacatccgttcggcacaaccgtaaccgcagaaacgttacgcaataccttcgcaccgttgacgcaatgggaagataaatatcgccagttgatcatgctgggaaaacagcttccggctttgccagaggagttaaaagcgcaggctaaagagattgccggatgcgaaaaccgcgtctggctgggatataccgtggctgaaaacggcaagatgcatttctttggcgacagcgaagggcgcattgtgcgcggcctgttggcggtgttgttgactgccgttgaggggaaaaccgccgccgaattgcaggcacagtcgccgctggcattgtttgatgagctgggattacgtgcgcaacttagcgcctcacgcagccaggggttgaatgcgttaagcgaggcgattatcgctgcggcgaagcaggtttaagcacagaaccaggtcggataagacgttcgcgtcgcatccgacctgattgtttacccctgacgcgccgctttcgccatcatcttcttcagcgcatgagaaaccgcaacaaagccaaaagtggcggtcaccatcgtcgccgcgccaaatcctgaggcacaatccatccgctttggcccttccgccgtggctttcatcgcacagacggtgccgtctgactgcgggtacaccagcgcttcggtagagaacacgcaatccacgccgagcttacctttactgtttttcactacgccaaaatcgcttttcaggcgctcgcgcaacttcgccgccaacgggtcctgaatcgttttcgccagatcggtaacctgaatctgcgtcgggtcaatctgcccaccagcgccaccggtcgtgaccagcgggattttattgcgccgacaataagcaatcagcgccgctttgggccgtacactatcaatagcatcaatcacgtacgaataaccggcattcatatattgcgctacgttatccggcgtcacgaagtcatccaccaccattacacggcactccgggttaatctggcgaatacgctccgccatgacttccgcttttgccagcccgacgttatcgcgcagagcgtgaatttgccgattggtattggtgacgcacacatcatccatatcgataagcgtgattgcgccaatccccgtgcgcgctagcgcttccgccgcccaggaaccgacaccaccgataccaaccacacaaatatgcgcgtcagcaaacagttgcaatgctttttcaccatacagacgcgctgtgccaccaaaacgctgacgccatgcatcactaattaccacagacatagcacctcagaattaaaaagggtgaggttacccctcaccctgtcatatccgtaaaaacggcatacagaatatcacatcagccgctaaagacgttacctgcgcccggggcggttttcagcacccagacacgtccatagtggttgtaccaaccagcgcggtgtccggcttccggcccgatcccttgatagatatcgaagtgttggcctttgattgcgccaccgacatccagcgccaccatcagacgcaattcgtactgaccgttaaatttgccgttattatccagcagcggcacttctgccagcaaggtagtacctggcggaataattgaacgatcggaggcaacagaagcacggccaaccagcggcaccgcacttgcccctttcaccggtgcaaaagattgcggtttaaagaagacgaaagacgggttctgttccagcagctcgcgaacctcagcttcactgtgtgtttcgccccagtgacgaatcgcctgcatcgacatatcttcttttttcacttcgccacggtcgatcaacaccttaccaatgctgcgataggcatgaccgtttttccctgcatagctgaaaaagttaagcggactgccatcaccaaagtcgatatacccgctaccctgcacatccataatgaagttatccatcagggagttactgtaagcgagaatatatttatcactcagagctcctgcgtagatctccgcacgagacggcagacgaccacgttttggcggcatacggtaaatcggatactggaactcgccctgacgggtatggcgcgcctgaattaccggcgtgtaatagcctgtaaactgcacgttaccatagttgtcgacaccttccatctgccaggcatcaatgccgaactggcgcatattgcgggtatcaccgcctgcgcgcagccactcttgcaccgcgttataaacattactctggttgccatacagacgcggtgacgaattacggatatggttaatttgctcggcaaaatcaccggcattaatcggcgcgccaacggcatctggctggttcaccagagagaaaggctgggtaaatttcccgtctttatattgctgtccgcgatcggttggtttggaagagcaggcggcaagcattgccacaaccgtgcccataagaaggtactttacccaacgtcctttcattgttctcttcttcaggttaaaaaataaggcgcaacgaagataacaaaccaccgcgtttaatgaaatgagcagcctctccctgacgcaaattttgcacaaaaaataggctttagtgatttgtttttgttcaaaatcatgccgaatccgtgatcggggtaaaaaaaaggttgcatgaaaacgcgagcagagtatagtgcgcatccacggacgcggggtggagcagcctggtagctcgtcgggctcataacccgaaggtcgtcggttcaaatccggcccccgcaaccaattaaaatttgatgaagtaaagcagtacggtgacgcggggtggagcagcatggtagctcgtcgggctcataacccgaaggtcgtcggttcaaatccggcccccgcaaccaatcaaaatttgatgaaataaagcagtacggtgacgcggggtggagcagcctggtagctcgtcgggctcataacccgaaggtcgtcggttcaaatccggcccccgcaaccaatttattagaatgctgacaaaccgcaaagctgctattggcttgcggttttttcgtttttacgcttccttacccgtttcagtgaagcctgagacaatgagtaaaccgttaatatccctccatcaaagccatccatcttatttatatattaaacatataccccattaatgaatttcatttatatattctataaatcaatttattttggttatgttaacatttcaatatcacaacagggcgcaacgcttatataatcattgtacaaaaagcacacaactttttaattagtagaaaaattaataattttttgtgaaagcccggacaataagtttaatgaatatcttaataggctctcatactacccaatttcttaaaagtgcaaatttgtgaagcttatcctgttattattttaagtttcatgccaaattctctcaccagataatgccgccctcttccgaaaaataatcaagaggccaaacaatatctaaaatgatacaactgtatctattcccctgaaaaatacattattcatttgtatattttcctcatcattgctttttatttaaatcatccgataatcccctgaatataattatgtcaataaccatcagaaaaagtggatgatgaggaaaaggatatggccgacagtttccagaatgaagttcccgccgctcgtgtaaatatcaagcttgatctgcatacaggcaatgctaaaaagaaagttgaactccccctcaagcttcttgccgtaggcgattacagtaacggaaaagagcaacgtccgctgtccgaacgggacaaggttgatatcaataaaaacaacttcaacagcgtcatggctgagttttcgcctgcggttaatttaacagtagaagatacgctaaacggaaacggtaatgaacaaaatatcgcgcttgaatttaaaagcctgaaggattttgaacccgaacaggtagcaaaaaatattccgcaacttcgtgtattactcgctatgcgcaatttactacgtgacctgaaatccaatctgctggataacgcaacgtttcgccgtgaactggaaaatatcctgaaagacccgacgctcagttcagaactgcgtgatgaactggcgaaaattgcgccgcaggagaacgtttaacccgaacgcgtattcaggttaaaccggagaagaaaggatcactgaaaaggaaatgctgatgtctgtacaacaagaacatgccacctctgaaactgcaacactcaccaccactgagtccggcggcgtttatcagtccctgttcgataaaattaatttaaccccggtgtcttccattcaggaaatcgatttatggcaaaacagcgaaacgctggccgatgcctcacccgatgagcgcgtgacggcggcgattcacgttctgctttcctgtctggcgaaatcaggcgaggacgtggttaagctcgacaagagcctgctggattttcatatcgacgatctggatcagaaaatcagtaaacagcttgatgcggtcatgcaccaccctgaattccagaaagtcgagtcgctgtggcgtggtacatggttcgtcgtacagcgcactgattttcgcaaaaatgtcagaattgaattgctggatatcagcaaagagcatctgcgtcaggattttgatgattcaccggaaatcattcagagtggtttatatcgccatacatacattcaggagtacgatacgccgggtggcgaacctgtagcctcattaatatccagctatgaatttgataacagcccgcaggatattgccctgctgcgtaatatttccagagtgtctgccgcttcccatatgccttttatcggttctgtcggaccgaaattcttccttaaaaattcgatggaagaagtcgccgcgattaaagatatcggcaactactttgaccgcgcagaatatattaaatggaagtcgttccgcgatacggatgacagccgctatgtgggattagtgatgccgcgcgtgctgggccgtctgccctatgggccggacacggtgccggtacgcagctttaactatgtggaagaagtcaaaggcccggatcacgaaaaatacctgtggacaaacgcctcgttcgcctttgccgccaatatggtgaagagctttgtgaataatggctggtgcgtgcagatccgtggcccacaggcgggcggcgcagtggccgatctgccgatccatctttacgatctcggcaccggcaatcaggtcaaaattccgtccgaagtgatgatcccggaaacccgcgagtttgagttcgccaaccttggctttattccactctcttattacaaaaaccgcgattacgcctgctttttctcggcaaactccgcccagaaaccggcgctgtatgataccgctgacgccaccgccaacagccgtatcaacgcccgtttgccctatatcttcctgctgtcccgcattgctcactacctgaaaattattcagcgcgagaatatcggcaccaccaaagaccgccgcgtgctggaactggagcttaacacctggatccgcacgctggtgacggaaatgaccgatccgggcgatgaacttcaggcttcgcatccactgcgcgacgggaaagttatcgtcgaggacatagaggacaatccgggctttttccgcgtcagactctttgccgtgccgcatttccagatcgaagggatggacgtcaacctttctctggtttcccagatgccaaaagcaaaagcctgatcgggcggtggtgtgatgtatgaaaatttgtcgaccactgtgggctgaggggacattcctgtcttctcagcagtttcagcagcaggcccgctgggaagcgttcagcaatgacagcattgcgcagctttgtattcgccatccgtgggggatcgcaaacgtgctctttgaccgggatgccctggcgctcggaaagctgaaaacgcaggcagtacgcctgcgttttgctgatggtacgctgatcgattcagacgtgagtgacgtcctgccgctcgcctgcgatctgcgcgcgctgaagaacgacagcgcgattgtcctgctggcgctgccgcttgcacatggtaacggcggtaatctcggtcagggtgagcagactgaaagaccgctgcgctatcgtcaggaatggcaaaaggtgcaggatatctacggcagtgacagtgaagatatggccgttgagcgtcatgcgctgtccctgcgctttgctcatgataacaatcaggattacatcacctgcccactggcgcgtctggtgcgggatgttcagggcaactggacacaggatgagagctatattccgccgttactggcgtttaacgcccatgacgggctggtacagcgtctggacacgctgctgttgcagctacgggccaaatgtcagcgcctgatggcgatgcgccgggaaagcaaccagcgtatggcggacttcgccgtcgccgatgtctccctgttctggctgcttaacgcgctgaactccgccgagccggtactgagtgatttcctgcgctacccggcggttcatcccgaactggtctggcgggagctggcgaggcttgccggtgcgctgctgacgttttcccttgaacataacgtcagcgccgttccgccctatgtccacgaatcgccgtccatcgtctttccgccacttttctccctgctcagcgaactgctggaagccagcctgccgtcacgggtgatcgcgctggatctggcgtccctgccgggcaaccgctggaaagcagacctgcacgatccgcgcctgcgggaagaggccgacttttacctgtccgttcgttcctctctgcctgcgcatcaggtactgcaccagctaccgctggtctgcaaaatcggtgcgcctgatgacgtcacgctgcttatcaatgtggcgctgaatggtgttccactggtgccgcttacctcagttccggcagcgctgccactgcggctggagaaccagtattttgcgctggatatgcacagtgacgcggctaaatcgatgctggagtccgggtgctgcatgatttatgcgccgggaacaatgggcgacctgaaacctgaactgtttgcggtgctgcgcacatgaaaaaagagacggatatcaatatcgacgcgctgctgcgcgacacgtttctgacggtggtggaactgcgtcagggaaccaccgtgcgtcacggtatggagctgtatcgccactgccagcggcaggtggaactggtccgcgaacgtctgaaagatgccggattcagtcgggagaacgtggagcacataacttacgcgcagtgcgccctgctggacgaaacggtcctgagccgtagcggcatggacgacggtcagaccatctggatgaaggatccactccagtcgcatttcttcaacaccctgcaggccggtgagctgctgtacgagcggatgaagcaggtgctacaggaacccgcccccgcgcaggccgtgctgacctgctttcaccgtgtcctgctgctgggatttcgcgggcgttatcaggatccggcagccccggagcgcgaccagcttatttcgacgctcaacgggcaggtcgcgccatttggtgtgctgccggaaacggcggtactgaacgtgccgttatccacccgtcagcaccctttgctgcattcgccatttttctggctggtaacactggcgctgctactggcgggcgtctggtgggggctacaccactggctgaatgtactggtggatgaactgctgccgcaaagcctgcgttaaagggagtcgtgagtgaggaacacgctgaaacaggccatcgtgctgtggggaatggtgttactgctggtgctgtggtcagtgtttatcagtccgtctggcgtgctgagatgggccggtgcggcggctatcgttctggcggttgccgcgttgttgatttatcggcgcaggcaggcgtggacggagatgaccggcgatgccgggttgtcatcgctgccgccggaaacctaccgacagccggtagtgctggtctgtggcggtctgtcggcgcacctgtccactgacagcccggtccgccaggtttcagaagggctgtatctgcatgttcctgatgaagaacagcttgtggcgcaggtggagcgattgctgacccttcgcccggcgtgggcatcgcagcttgccgtggcgtataccatcatgcccggcatacaccgggatgtggcggttctggccggacggctgcgacggttcgcccacagtatggcgacggtgcgtcgtcgggcaggcgtaaacgtcccctggcttctctggagcgggctgtccggctcgccgttgccggaaagagcgagttcaccgtggtttatctgtaccggcggcgaagttcaggtagcaacatccacagagaccaccatgcccgcgcagtggattgcacaatccggcgtacaggagcgcagtcagcgactctgttacctgctgaaagctgaaagcctgatgcagtggctgaatcttaatgtgctgacggcactgaacggcccggaggcgaaatgtccaccactggcgatgaccgtggggctggtcccctcgttgcctgcggtggataacaacctgtggcagttgtggatcaccgccagaaccggcctgacgccggatatcgcggacaccggcacagacgatgcgctgccattcccggatgccctgttacggcagttgccgcgtcagtcgggctttaccccgctgcgacgagcctgcgtgaccatgctgggcgtcaccaccgtggcgggtatcgccgcgctgtgcctgtcagccacggcaaatcgccagttattacggcaggtcggtgacgatctgcaccggttttatgccgtcccggtggaggaatttatcaccaaagcccgtcacctgtcggtgctgaaagacgatgcgaccatgctcgatgggtattaccgggaaggagaaccactgcgcctcggtctggggttataccccggcgaacgcatccgccagccggtattacgcgccattcgcgactggcgtccgcctgaacaaaaaatggaggtgacggcttcgcttcaggttcagaccgtgcgtcttgacagtatgtcgctgtttgacgtcggacaggcccgcctgaaagacggctcgacaaaagtgctggtggacgcactggtgaacatccgggcaaaaccgggctggctgatcctcgtggccggatataccgatgccaccggcgatgaaaaaagcaatcagcagttatcgctgcggcgtgccgaagcggtgcgcaactggatgctgcagaccagcgacatcccggccacctgttttgccgtacagggactgggcgagagccagcctgcggcgaccaacgacacgccacagggccgggcagtcaaccggcgtgtcgaaatcagtcttgttccgcgttctgacgcctgtcaggacgtgaaataaaacataccgccggaagaaggcggtgcttcaatcacactaacaaggagagtaattctcatggctattcctgcttatctctggctgaaagatgacggcggcgcggatatcaaaggttccgtggacgttcaggggcgcgaaggtagcatcgaagtggtggcgctggatcacgatgtgtacatcccgaccgacaataacaccggcaaactgaccggtacccgtactcacaagccttttacgtttaccaaagaaatcgatgcgtccagcccgtatctctacaaagctgtgaccaccggacagaccctgaaaacggcagaatttaagttttaccgcatcaacgatgccggtcaggaagtggagtacttcaacatcacgcttgataacgtcaagctggtcagagtcgctccgcttatgcacgacatcaaggatccttccagagagaagcataaccacctggaacgtattgagttccgctacgagaaaatcacctggacttacaaagacggcaacatcattcattccgactcgtggaatgagcgtccttccgcctgataactgcggcagacaggaaactgtctgcctttttgttgtgtgctttgtccagtgccgcaggcaccggtactgagcaaagcatacccacaatctggtgatacctgatgggcctgagtgaggtaacggctatgggcggtagcgtgcctgaacgcggatcgcaggaatacagaacacgataaggaaacccttctatgacaggaaatcaccccgccgcgctgctgcgtcgccttaacccatactgtgcacgggcgctggacgctgccgcctcactgtgtcagacccgcgcccatgcggaaataaccattgaacactggctgctgaaactgctggagcagggagaaggcgatatcacggtgattgcccgccgctatgaatgggatatcgacacgctctggcagtctctgctggcacatctggacaccttaccccgcccggtccgcgaacgtcctcaactttctgaaccgctggcagcgcttatccgacaggcgtggctgatagcgtcactggaaggcgacgatccacaaatccgcagccagcatctgctgatggcgctgacagaaaaaccgatgctgcccgcctgtaatgacctgtgggtattgctgagtctgagccgcgtgcagcttgagcggctgcgtcccctgctggatgcgcagtcggatgaatgtccggcacgtcagccacaggtcaccgaaccgctgacctctgcactgccggagacggcaacggcggacgcaccggcaaaaacgctgacggagaaacaggatgacgccctgctggcggtgcttaaccgctttaccgaagacgtgacggaaaaagcccgcagcgggcgaatcgacccggtattcgggcgcgacacggaaattcgccagatggtcgatatcctctcccgtcgccgcaaaaacaacccgattctggtgggagaaccgggggtgggcaaaaccgcgctggtggaagggctggcgctgcgtatcaccgaaggcaacgtgccggacagcctgaaaacggtgcatatccgcacactggacctcggtctgttacaggctggcgcgggcgttaaaggtgaatttgaacagcggctgaaaaatgtcatcgatgcagtgcagaaatcaccggagccggtactgctgtttattgatgaagcccataccattatcggtgcgggtaatcaggcaggcggcgcggatgcggcgaacctgctgaaaccggcactggcaaggggcgaactgcgcaccatcgcggcgaccacgtggagcgaatacaaacagtattttgagcgcgacgccgcgctggagcgccgcttccagatggttaaggttgacgagccggatgatgacaccgcctgcctgatgctcagggggctgaaagcccgctatgcgcagcaccacggcgtacatatgctggacagcgccattcagaccgccgtgcgcctgtcgcgccgctatctgaccggacgccagttgccggacaaggcggttgatttgctggataccgccggggcaagagtccgcatgagccttgacaccctgccggaaccgttgacgcagcttcatgtgcgactggcggcactggatattgagcgggaagcgattgagcaggacagcgtattttatcccgaagccagcccggagcggctggcggaactgaccgatttgcgtgatgagctacaggcagaagccgggcatctggaagcgcagtatcagcaggaaaaggcactggcgcagcagattatgacgttgcgtcaggaagggacagacagcactgaactgcaacagcaactgcgaacgcatcagggctttgcaccgctgctggcgctggatgtggacgcccgcgccgtcgccacggtggtggcggactggaccggcatcccgctatcttccctgctcaaggacgagcagagcgacctgctcagtatggaacagagtcttgaaaaccgcgttgtcgggcaaagcccggcgctctgcgccatcgcacagcggctgcgggcggctaagaccggcctcacgccggagaacggcccgcagggggtattcctgctgaccggccccagcggcaccggtaaaaccgaaactgcgctcacactggccgacactctgtttggcggtgaaaaatcccttatcaccatcaacctctccgaatatcaggagccgcataccgtctcccagcttaaggggtctcctccgggctacgttggctacggtcagggtggcgtactcaccgaagccgttcgcaaacgcccttacagcgtggtgctgctcgacgaagtggaaaaggcgcaccgcgacgtaatgaacctgttctatcaggtatttgaccggggctttatgcgcgacggcgaaggccgggaaattgacttccgcaacaccgtgattctgatgacggctaatctgggcagcgaccacatcatgcaactgctggaggaaaaaccggacgccacggacgcagacctgcatgaactgctgtatcccctgctgcgcgagcacttccagccagcactgatggcgcgttttcagacggtgatttaccgcccgctgggacaggaggcgatgcgcgccattgtggaaatgaaactggcgcaggtggcccgccgtcttcaccagcactatgggctggaaacggaaatcagtaacagcctgtacgacgccctgaccgccgcctgcctgctgccggacaccggtgcgcgtaatatcgacagcctgctgaaccagcaaatcctgccggtcttaagccagcagttgctggcgcagcaggccgtgcatcataagcctgcccgactgcggcttgactgggatgatgaagacgggattgtgctggaatttgatgagaaataatggaggctcttatgaacgtacagttcttcgaccacgcacaccacaagctcaaaattcgcggcctgcaaagtccggtggatgtgctgacctttgaaggccgcgagcaactgagtaccccgttccgctacgacattcagtttaccagcagcgataaagccatcgcgccggagtcggtgctgatgcaggatggcgcattcagcctgacggcaccgccggtacagggaatgccggtacagactgccctgcgcaccctgcacggcgtcattaccggctttaaacatctctcatcgtcacaggacgaagcccgttacgaagtgcgccttgaaccccgtatggcgctgcttacccgcagccgccagaacgccatctaccagaaccagacggtgccgcaaatcgtcgaaaaaatcctgcgcgagcggcaccagatgcgcggtcaggacttcgtgtttaacctcaaaagcgaatacccggcccgcgaacaggtgatgcagtacggtgaggacgacctgacgtttgtttcacgcctgctgtcagaggtgggtatctggttccgctttgccaccgacgcccggttgaaaatcgaagttatcgaattttacgacgaccagagcggctacgagcgcgggctgacgctgccgcttcgccatccttctgggctgtttgatggtgaaacggaagccgtatgggggctgaacaccgcgtacagcgtggtggaaaaaagtgtctccacgcgggactacaactaccgtgaagccacggcggaaatgaccacaggccagcatgacgccaccgggggcgataacaccacttacggcgaagcctaccactatgccgacaacttcctgcaacaaggcgataaagaggcagcggaaagcggcgcgttttatgcccgtatccgtcacgaacgctacctgaatgaacaggccattctcaaaggccagagcaccagttcactgctgatgccggggctggagataaaagttcagggcgacgacgcgcctgcggtgttccgcaagggcgtgctgattaccggcgtgacgaccagcgcggcgcgtgaccgcagctatgagctgacgttcacggcgataccgtactcagaacgctacggctaccgtccggcgctaatcccccgcccggtcatggccggaacgctcccggcgcgggtcaccagcacggtgaagaacgatatctatgcccatatcgacaaggacgggcgctaccgagtcaaccttgactttgaccgcgatacgtggaaaccgggttatgaaagcctgtgggtacgccagtcgcgcccgtatgcgggagacacctacggcctgcacctgccgctgctggcgggaacggaggtcagcatcgcctttgaggaaggcaacccggacaggccgtatatcgccggggtaaaacacgactcggcgcacaccgaccatgtgaccattcagaactacaagcgcaacgtgctgcgtaccccggccaacaacaaaatccggctggatgacgagcgcgggaaggagcatatcaaggtcagtaccgaatatggcggcaagagccagctaaacctcggccatcttgttgatgccgggaaagaacagcgtggcgaaggctttgaactgcgtaccgatctgtggggcgcggtgcgggcgaagaaagggatttttatcagcgctgatgcgcaggataaggcgcagggtcaggtgctggagatgcagccagctctggctcgcctttctgcagcgttggtgacaatggaatctctggctgccagtgcgcaacaggctcaggcactggcggcagatgtgagtcgtcagcagacgctgttgcagcaaaaaattgagcagttacagcaggaagtgctactgggtagcgcacctaagggcgtggcgcttgtcagcggtgaggatatgcagttgtctgccagcgataatctgactctgacagcaggtaagcaactggatattggcgtacagaaagactttacgctggcagcaggaaaacagctcagcttgtatagccgtgcgggagcaaagctctttagctcacataacgatattgatattcaggcgcaggggggaaatctgaccacctggtcaacacaggacacctatatatcgagtggtaaaaagctggtggtgacagcgcaggatgagttaacactgatttgtggcgggggctatatcaaaattaaaagtggcaatgtggagattggcggtccgggaaaactattggttaaaaatgccggtattaagaaagcaggctccggtagtatgcagggcgtgatgaagtcgtttgagcctgaaagtttcgatgaaaatttcattatttcgaatccagcatcaggtaagccgatagcaaatcaaaaatatgaaatacacatgccagatgggagtgttattgccgggataaccgatgcaatggggtattcctctcttgttgcgtcaaaagcatctgatgacctaaaaattattctgaaaaaatgatttcagggggaaatatgttgaaagaatggatgatatttacgtgcagtttattgactctggctggggcgtcactgcccctcagtggctgtatttccagaggccaggagtctatatccgaaggggcggcatttggggcagggatcctgcgcgaaccgggagcaacaaaaaaagccgacacgaaagacctcaatgtgccaccaccggtttatggtccgccgcaggtgatatttcgcattgatgacaaccgctatttcacgctagaaaattatacccactgcgagaacgggcagacgttttataataataaagcaaaaaacattcatgttaaaatattagacgcttcagggtatttatttaaaggccgcttattctggttatcaacgcgtgatgattttctggcctttcctgccacgttaaataccagacacgcttcctgtatggggtcgaataaaggctgtatgaatgcggtcattgtcactaccgatggtggaaaaagacgcagtggtgtgccatacggcagttatacccagaatccgaccggtgccacgagggattatgacatgctggtgatgaatgacggcttctacctgcttagatatcgggggggacagggcagatttagtccggtgatacttagatggattctcagtactgaagatagctctggtgttgtgcgttcagaagatgcttatgaattgttccgtcccggagaagaggtaccctccaccggtttttataaaatcgacctgtcacgtttttatcccaaaaacaacgttatggaaatgcagtgtgacaggacgctggagccagttcaaccttcagagagtaaaattcaatgagtaccaataaatcagagccaacccgaaaggtcgatgttcatcttacggataatggtactccttttgcctattcaatgacctctcataaaaatgtcaaagtccgtgcggaagttcaaccaccgctccagttacccggcttaattatttttgttcacggcgttaattctgaaggcgaatggtacgattatgctgagaggtcgttatgcgccggactcaatcagcgcctggggcttgaaggtgagcatggtcttaaggaaaacaactatgaaggaggtttctttgtcaacagcgataaaagtgagggtggttgggaacatacctacgaaatagagggttcccaaaagaaatgggtttcaggccccagaaaaataacaaaaggtggtgacggtcgttccccggttattcgtttttactggggctatcgtgcggcggataatgaaaccgatacatacgccattccgctaaaaaataaaaagggggacaactattatgaccttcccccggaatcgcgtaaagccaaaggcccttggttttggggcggcggtccgttccagaatggctgcaaccaactggtcagcctgtggagtaaaaccgggtttaataacaatccatccctgctgggggttccgcttccgttcagtactcaggtactgaacggcgaacgtgacaggctactaagcgacgccccaccaagacactattacgctcatgcggctggtcgtctggccaaattaattaaaaccattcgcaaccagcatccggaagacaccgttacggtgctgtcacacagtcaaggaacaatgattgcgctggcggcggcagccatcgaagcgccggatgcgctgtttgtgatgaactccccctatgcgctggagaatgaacctaccacctatatttcctacccgataaaggaaattatcagccgtaaggccagatcggcgacgtttgccgatattgtcaaaaaggtagcggaaaacaaaacgcggctgaagcaacagggctgcgacaatctgctggcaggcatgagcagcgacggtaattcatggatcccggaaggtaaaacacataacggactaccggagcgggacaaccatggaacgacgtggatttattgtaatccccatgaccgagttatggggtcttcccccctgcgcagtattggctggcaggggctgccggatactaaagatggcacaccacataccttatttaaacaggctggagatacgctttatgttcgtatacttgggcgcaatacaccctgcggcggtacgccgaccgcacagacccatttcagtaatttgggtgatggcaaacccttctgggacagcacaacaacgctgttacagagggcaacgtggccggatccggacagcgggcagacattaactattaacgcgccgcaggtgccggaaccgctgacagctgaagaactaaagaattttgatcaagactatgcccgtgacgaaaagcaaagcggcggagcaggatatgcttacgggcagattaacccagagacgaaaaaacctgtcgataccgactatcgttattacatttcactgtatggctattttgaccggaagatggtgccgaaaaaagactcgggatactaccagtcagggccggggtcgaaagaggacagggtaaagtatgaaaagcagtcacaagaagagatgctggaggaggtaagaacctatgttcagcgtccaacagatcacagtaccctgccatcggatgagcgatttatgagccgggtggtggcctatgatttacccatcggttactgctggcattcgtgggacaaagcgggtctggaagagcttcgtcgtcaggctgactggctggaaagcgatgactattactttagtggcaagctgactgttccgccaataccgcctgcgataaaacaggatgtcgccgaagatgctgaacagagaaaggcagaagaaaaggcccggttacgtaatgtgtgaaacaaatacatggaaagtgatatgggaaaaaatgtggtagtactcaatgacgcaacttctcacggtggcaaagtctcttcggcctcttcaacctttgatattcagggaaaaaaggctgcactgctgaatgataccgtcacttgcccgaagcatggtactaacccaattgtggagtgtgataccagttatgaggagggtggacgtgggattgttgtgcatggctgtaaaagcgcctgcggctcggtggtgtatgccagtctgccggatgtggagataggctgatggggtggtcaaaaccgaaaattcccaccagcaaagacgtgcagcgctggtctccttgggtatgcctttttattctgtttgccggggcatttgtcgcgctcacatatgggatactgcattcccctgcggacggactccccgccctcgccagcggttactggttgcccttgacaggcaggatgatggctggagtgatgacagccctaaccggctatttgttgtggtgggagtttcaggcatattacgtctggtgctggaatagtcggcggcacagcgcactccttgtctggcagcagcgagcacatcagcaccgctacttagcctgccatgttctgctgacctcagacacgcaactgcttcctcgcctcgcaggtacttcttatgaagataataataatgatcctcctttaacattattggcagaggagccgctgatacccggtattgcgcgttttgagcaactttgccagttactgataaaccagattaaagcttctcttattcagcattatccttccggtcagatgactgtactgattgaaacctctgcatcggataaagagcgtgagcgaacaacccttattcgtttatggaaagaggatgaattaccctggatactggacatccatatgtcacccactccccttcctctcagtgatgagaataaccacttatttgatattgataaccctgttcttgttttggcgttgcactaccgccagccggaggaaaacctgccggaattcgccagcgcattgttactgttgccgcccgagttactgaaagtttctatacggcgggatacggtgcgggtgtttcgcccgatgccactaaacattgatgcgatctcccgtgagttgactgaactgcgggatatggcgcaacagccagtgaatgccagatatctggtctggcacagtggtctgacacaggcatcacaacaggctctgggccgtgtggtgaacgaccttccgttatccctgcataacgatatcgccactggcggaattattgatgtggataaagttatcgccgcttacgggcctcctgccggttggctgatggtggcaaccgccgcagagatggtcagatacgggccgggaagtcactggttgttacaggtcagaaataaacaggccagtgctgtggtgacgggcaacggctatccggcgattaatcaggaataccttgatacaacctcatctccttatcccgcaggttccctaatgctggcggttatgctcaatatactggtgctctggtttatcgggcggtacagccaggaatggctgttttcctgggcaggcgtagccatgacactgttgctgatgatagtgacattgccaggcatcgtctttggtttacgaagcgctgttgctcatctgcaataccctcgctttatacaggctatcgttcgcgcccagaaggaataatttgttatgaaaagagttgtgcgtcttttgggtgtggggttactgctccttgttgtgttgttgctcattttgtttgttctggctcagaccacaccgctgatatcagcacaggatgagcatgctgtctggcttcgtctgttgataacagcgattgtgatctgtttgctaagtatgtgcatatttttcctcttttctttccggcagaacgaagcctcgacgatatcactatacgctcaaccgactgatataaaggaaataaatacggagcagccgaactatgcatcactgctgacgatatatttacgcgaccgctacggtccgttctggcggcgtaaagtccgcctgctgctggtgaccggcgagcctgaacaggcagaagccatcgcgccggggctgaccgggcaacactggctggaaggcgaccacacggtgctgatatatggcggcaggccaacagcggagcctgatgtcacactgctgaccgccttaaaaaaactgcgccgcagccgtccgctggacggcatcatctgggcgctgacagaagaacagagccgccagacagcgcaactcgacaaaggctggcgcggactgataaacggcggtaagcgactcggttttcaggctccactctatttgtggcaggtctgtgacgacggtgattatcagaccggacgccccctgcaaagcgtcggctgcctgctgccggaacgctgtaccccggaacaactggctgtaatgctggaagcacaaaccctgccgctgacggaacagggcatgtcgcagctactgaccgataaccgccatgattttctgctgcgtctggctcatacccttgcagagcggggtattgctcactggcagaccgtcctgaaaccgctgctggcaggcggcgcattttcttccctgcgcctgcgcggcctgatgttcagcccgccgcttgccgccgtgccggaggccgcacctcatgcgtggctgccgtcaccggtctgggcgggcgtgacgggtgataacgcgcgcgggcgcacggtgggttttccgtggctgcgtaccgcactgatgtccgctgtctgcgtgctggtgatatggggggccggaatgacgacctcgttcttcgccaaccgcgctcttgttcaggaaaccggtatccagacggcacgtgcgcttgatacccgcctgccgctggcagaacaactggtggcgctgcataccctgcagggcgaactggaacgcctgcaatatcgtatccgcgaaggtgcgccgtggtatcagcgttttggccttgaacgtaaccaacaactgctcgccgccgcttttcccggctatgcgcaggcggcaaaccggctggtgcgcgacgtggccgttgaccatctgcaacagcaactgaacgcctttgtcgccctgccgcccaacagtcctcagcgtaccgccaccggtgaacaacgctataagcagcttaaggcattgctgatgacttcccgcccggaaaaggccgacgctgcctttttcagtaccacgctgatggcggacggtctgcgctacgagaatatcccggaaggtgtgcggcagagcgtgttgccgtcactgctgaccttctggacggcgaacctgccggaacacccgcagtggaaaacatcgccgccaccggaactgaccggcgcagtgcgtaaaatcctgctgcgccagattggtgtgcgtaatgccgaaaacaccctctaccagaacgtgctgcaacaggtgtcccgcaactacgccgatatgacgctggcggacatgaccggggataccctcaccgaatctcttttcagtacggaacagacggtgccggggatgttcacccgtcaggcgtgggaaggacaggtcagggaagccatcgagcaggtggtgacggcgcggcgcgaggaaatcgactgggtactcagcgaccgccagcaggatacctctgcggatatctcgccggatacgctgcgtaaccgtctcacctcacgctactttaccgactttgccggaagctggctggcgtttctcaacagcattcactggaaaaaggaagactcgctctccggcattctcgaccagctgacactgatggccgatgcccgtcagtcgccactgattgcgctgacggacaccctcgcgtggcaggcggcgacaggcagggaaaaccgtggtctgtcagactcgctggcgaaatcggcacaggaactgtttaacggcaaggagaaaacgccgcagcaatcccgtgaaggtgacgacgtgcctgtcgggccgctggataaaaccttcacgccgctgctgcgtttgctgggcgataaggccggaggcggcgacagccagctgagtctacagacctacctcacccgcgtcacccgcgtgcgcctcaaactgcaacaggtgaccaacgcccccgacccgcaggagatgacccaacaactggcgcagacggtcttacagggtaaaaccgttgacctcaccgacacccgcgactacggacggttaatcgccgccagtctgggcgaagaatggagtggcttcggtcaggcgctgttcgttcgcccggtagagcagtcgtggcggcaggtgctgacgcctgcggcggacagcctgaaccgccagtggcagcgggcgattgtcagccactggaatcaggacttcgctggccgctatccgttcaaagcctcacagaacgatgcctccctccccctgctggcgcagtacctgcgcgatgacgggcgcatcaacctgtttatcgccgccaacctttccggcgtgctgaaacgagagggccgctactgggtggctgacgccatgaacacgcaggggctgacggtcaatccggactttatccgcgccctgaaccgcctgcgcgacgtggccgataccgcctttgccagcggcgatgccgggatacattttgaactgcgggcaaaaccggcgcgtgacgtgatgaagacgcatctggtgattgacgggcaggagctggaatatttcaaccagaaagaacgctggcagcgttttaactggccggatgaacagtggcaacccggcgcatcgctaagctggaccagcacacaggcgatggagcgcatactggcggattaccggggaagctggagtcttattcgcctgctggaacaggcgcaggtgacgccggtggacagcagcacctttaaggtggtgtggaaagcgcaggacggcctgccgctgaattacctgctacgggttgaacagggtaaagggccgctggcgctgctggagctgaaaaacttccgcctgccgggacaggtgtttctgaccggaaaaagtatgaaggatgtggaagagtatggggaagacgccgatgagtgaactgttgcaaaagctgacccgtagctgttttgccgaccgggatgcactggatgtggcgcgaacacaggcggcgctgtggcagacatggctgctgccggtgacggcagatacgccggtcggggaagaccccggctaccacgacgattttctgcgtatccgcgacgagatgaacaaactttccggcgcggatacggacctcatctgccagcttgccgaatccctgctgctgacgcaggcaaaagacgtgcgcatcgccacttactacatctgggcgcgactgcaccgcgacggtgagcgcggactggcggaaggactggcgctgctgaccggactggtggaacgcttcggtacgcaactgctgccctcgcgcccggccagccggaaaatggcgctggagtggctggcgggggaaaagatgctcgacagccttgcccgctacccggaagtggcaaaagaggattttgcgaacattgttgccgccctgaatctgctgacggtttccttcgccgcgtggcccgaagaccagcattccccctccctgatgccgctgattaacgcgctggaatcgcgtctggcacagtcgggcggaatgaacgcggtggtgccgcagaacagcagcggcgttccggcaccgtcatccccggtggatgcgccgcaggtacagaccatcacctccggacgtgacctgctcgaccaggcgaaagtgctggcccgttatctgaacgaacagccgcagggctggctttcggcgcaccggctgatgaaaaccctgcgctgggatacggtgcatgaactgccgccggacgtggacggcaaaacccggctggccccgccgcgcaccgagtcacgcaaccagcttaagcggctgtatgcccagcagaactggacggaactgctggagcaggccgacctgatgttcagcaccggcgtcagtcatttctggctggacattcagtggtatctgcatcaggcgctgactaaggcgggcgtaccgtgggacaggtggacagccgttatccgtcaggacctggcgttactgctggaacgcctgccagggctggaaaatctggcatggaacgacggcacaccgttcgccgacgaggtgacgcgcaactggatagcgcagcaggtcatgatgcgggaagacggcgcatggcttgcggggaaagccgctgtaccgacagacgacgccacaaatgacgtactggcgctggagccggaagcactggcgatggcagacagtcagggcgtggaagcggcgctgggctggatacagacccgtccgggcatcaccacggcacgacagcgcctgttattgcggctgctgatggcacgggtggcggaacagtacggtaaaaacgagatggcgctcctgctgctggaagaactggataccgccgcacagggaataacgctgacgcagtgggagccagaactgctgtttgaagtaaaagcccggcaactgaaactgctgcgcctgcgggcacatcgccacgcggacaaggcggcgcttgcccggaaaatggacgctctgctgggttcgctggtggcaatcgatccggcgcggacagcggtactgtgtgatacgcagcataaggactgatttcttatttgtatttcagattaaaggactttgatggacgacctgacccaacgctactatgaagccgaaatgcgctacctgcgtgaagcgggtaaagaatttgcgcaggcttaccccgaccgtgctgcgatgcttaatcttgataaacccggcgcacgcgatccctatgtggagcgcctgttcgagggcttcgcttttttaatgggccgcctgcgcgaaaagctggacgacgatctgccggaactgactgaagggctggtcagcctgctgtggccccactacctgcgaaccatcccgtcactttccgtggttgaactgtcgacagatcaccggcagatgaagcagagcgaaacgctgaaagagtttcaggtgctatcccgtcccatcggcgaacgcagaacccgctgcgtctacagtgccacgcgtgatatcacgctgcatccgctggcgttgccggacgtgtcattgcaatatgaaccggacggacgctcggttatccgtctgcgctttgcgtgcggcccgctggttggtgactggtcgcagatcgatttatcccgcctgccgctctatctcaatgccgacagcccggtagcctgtgcgttgcaccgggctttaacgcttggcacgcagcagttctggctgcgtctgccggggcaggaacgccgtgtgctggacgcgcacttttccccgatgggttttgatgacgatgaccgactgtggccgaaaggtgagtcagcgttcagcggctaccagttgttgctggaatatttcaccttccgtgagaagtttatgtttgtggcgctgaacgggctggagaacgtcatctggccggaaaggataaccggctttgagattgacgtggtgctggcggaaaactggcctcatgatttgccgtttaataccgacaatctccgcctgcactgcgtgccggtcatcaacctgttcccgctcgaagccgatccgttacacctttcgccgctggaaaacgaatttctgctgcgcccgatgcgcattcaggacgggcataccgagatttattccgtcgacaacattatttcttcgcgccataccggcagtcaggcgtatgtccccttctccagctttcgtcaccggggcgggatgctgcgccacgatgcgccggaacgctattaccacacgcgggtaaagcgcggcccttccggcctgcatgacacctggctgattctgggcggcgatgcatttgatactgaccggatgctggaggatgaaacgctctctttaagcctgaccggtactaacgggcagcttccccgtaaggctttacagagcacgctgctcgatacgccagttcatgcctcacagaacgtcctgcgggtgcgcaacctgtgcgctccgacgcagccctgctatccccctgcgcgtgaccgcttccactggcgggtgctcagtcaccttggttctaactttttatcgatgatggataacgccgaaattctgcgcggcacgctggcactgtacgactggaccgaaagcgagatgaaccgccgtcgtctggaggcgattgtcgacgttcagcacagcctgatacagcgttttgaaagaggctttctgctgcgtggcgtggatattcaggtgacgctggacagtaacggctttgccggagaaggtgatatcacgctgtttggtgaactgctgcaccgctttttcgcactgtatgccgatatccacttattcactcaactgaccttaattctgcaacccacaggaaagtgcctgcaatggacagagcatcacagccagcgcgtaccgggctgaccgaccggctggccccggatattgcgcggatcaatttttaccgtttttgccagttgctggaacagagccagcagaacgcgccgctgggcagtaccgacagccccgccaccgatgcggtgcgctttcgtcctcatcccggtatgggctttccggtcagcgagttaaaaaacgttgaacgtgacgcgggcaatcccgacgcgccccccacggtgcgcaccacctttctcggcctgtacggcgtggattcgccgctgcccaccgcctatctggactacattacccagcgtcatgacggacatgacgcagtgatggcgtttctcgatatttttaaccatcgctttattactcagtactaccgcatctggcgcaaatataactacccggcgtcgtttgaagcaggtgccgtggatgacatttcccgttgtctgctgggactcatcgggctgggtattcccggcagcgagaaccatatcgccacgccggtatcccgttttctggccctgctcagcgtgatgcgcctgccgacgcgcacggcggaaggcgtcacggcactggtagggctgcttgccccgctgaccaaagcgacggtggtgcctcacgatccgcagcctgtaattctcccggcccctgcgggtctgtcaaaaaattcacgcatcagcctgaaaacgcgaacgctgctggggcgtaccggtaccgacgccaacagccagttgctgctgaaactgtataccgaagatgccgcagaagcacgtggctggctgcccgacgggcaactgcacagcgatttgctggtgctgctgcgcgtttatctgggctggcgctgtcaggcccgtctgcaactgacgctgcccgtcagcctgttgcctgctgcccggctgggaaaacagcgtgtacagattagccgtaccggcatccttcgcgcctcctttgccgcgcccgcgaccggaacagtgacggtcagtctggggcgttatcagggattaatacccgctttttccattcgtaacagggagagtatgactcatgtttcctattcgttttaaacgtccggcgttgctctgtatggcgatgctgacggttgttctgagtggctgcggcctgattcagaaagtggtggatgaatcgaaaagcgtggcctcagccgttttctacaaacaaatcaaaatactgcatctcgatttcttctcccgcagcgccctgaatacggatgcggaagatacgccgctttccacgatggtgcatgtctggcaactgaaaacccgcgaagattttgacaaggcggattacgacaccctgtttatgcaggaagagaagacgctggagaaggacgtactggcaaaacacaccgtctgggtaaaaccggaaggcacggcatccctgaatgtgccgctggataaagagacgcagtttgtcgccattattgggcagttttatcaccctgatgaaaaaagcgacagctggcgtctggtgatcaaaagggacgaactggaggccgacaagccgcgctcgattgaactgatgagaagcgacctgcgactgctgcctctcaaggataaataaccgatgtcgacaccttccttatatgaaatgctgacgttcagtttcagcggcgagttaccgctggaacagatcagcgagcgggatcagcttatcctttccgtgatggacaatatgcaacgcattatcaactgccgggcaggcacgctggcgcatttgccggattacggtctgccggatctcagtctgatccatcaggggatggctgcgggtattcatggcctgatgcgtcagattgaagaaacactgctgcgttatgaaccacgcctgagtcagatacaggtggaattactcccccagccccgtccggggcatcttaattacctgatccacgcgcagcttcccgataccggctggatacgctttgatggcgtattttctccggaaggacgaattgttctgcgtcatctcaaacaacaggagcgggcgtactgatggcaagtaacgcgaattttatcagccagttcgtcatgggcggcgatccctgtacttataaggaatccggtgaactgcaggctgaaatgagtaaactgactcacccggcccgaccggatgtggactggcgtcaggtggaaaaactctgcctcgcgctgttccggcaaaatggcgtggaactacagacgctggtctgttacgtactggcgataaccagacggcaggggctggcagggatggcagacggactcggttcactggatatactgctccagcgctgggctgacttctggccggtacaggtacattccagaatatcactgctcagctgggtcacagaaaaaatgcagcaggcactgagaacgctggatattcagtatcaggatctgccgcagatctaccgttgtgtacagcatctttccgccatcgaaaccacgctgcaacagtgtgaactgtggcatatgacgaaactggatctactggccgggcagtttcgcaataccgcattgcgtctggaacggctggcgcctcagggagcggaaaccactatcactccccctgaattaccccgccgggaaatgaatcaaccgaaaaagtcagaggaaagtccacagccggtttttgcaaccagatccgttcagcaaaacgataaggatgccagtccacccgttccatcccctgaaatctcccggcagcggacatggccgatatttatggccggaatggttgtgatggccggtctcggcggaacaggattatggggctggtcgcagcttaatcagccggacgcgctaatccagcgaatacaactgtctgtcatgccgttgccgctgtcgctggagagcggcgaactggcaaagctggatgtaaaggataaggcgctgctggctcaggacagaacaattgcggcaagtcagatgcaactggagcagttaaacaaattgcctgcccgctggccactggagcagggatatcgccagctacgccagcttgatgccctgtggccggataatcctcaggtcagggcgctgaacgcgcagtggcgcaaacagcgggagctgagcgccctgtctgctgaggcactgaatggctatgctcaggcgcagagccagctacagcgcctgtcggcgcagctggatgcactggatgaacgtaaggggagatatctgaccggttcggaactaaaaacggcggtgtacggcatccggcagtcgttaaaggagccgccgctggaagaactgcttcggcaactggaagagcaaaaacagaccggagaggtttcgccaacgctgttgacgcaaattgatacccggttaaatcagttgttgaatcgctatgtcattttactggatacgaaggtggaacaaagtcagtaaacatcgggggatttatgtaccaataagggatatgtgaccttgccattttttaaaggagtctctgtgtacaaaaaaagagaggaacaggccattcgatctactcgttgattcacatcagataatgagtgtatatttcggtagatagcttgggttcgggaacagtgaataccttaagtttcaaaagattggattaacctcttgactgtggcccccgcaaccaatttattagaatgctgacaaaccgcaatgtgttctacaaattgcggtttttttgtatttaaaatctttgttcgctgaactcacaacacgttttttatctcccttcctgcgaagtaatcaattatcgactgggcaacgtgtatcccggtttgctggtatgactcaacggtggcggccgcgatatgcggcgttgtaatgatatttttggcatgtagcagtgggctaaattgcgccaacggttcagagctaaacacatccagcgccgcaaacacatttcgttcttcaatcacctgaagtaaagcgccctcatccagcaactttccccttgcgacattgatgagcagagcaccattgcgcatcatcgacaaatatttatgactaatgaagttctccagcccagaagaaaaaggcaaaagaacaatgatgacatgcgactgcataaagatatcttcaattgatacaaactgaactccagctttgtcagcaacctgatagtcgggttgtttgtcaaaagctaaaagctcaacatcaaaaccggataaccttttcgccagagttttacctatattaccgtagccaaccaggccaatccgtttcccttgtaattcacagccatgcgactcaccccagtagccattttgcatcgcatgatagctgccagggatatttctcatgctcgcgaagataagtccaatgataaattccgcaaccgcatttgaattaatcccaaccgcattattgacaacaataccggattgctgtgccgcacgaagatcaatattgtctatccccgtcccgaatctcgatattattctcacaccaggcagcaatgatagcgtgtccgcctgataaccatcttttccggcgatgaccgcgcaaatagattctcgtaatgcagtggattctgatttaagcagatgctccatattattcttaataataagattaaaattattctctcttagcaacttgctggcggaaacacagcgtgctgaaaagctggggacggtgaccagaacatttttcatagcggacactcacttcaaagaacgccaccccaaaagatggcgtgaccggttactgtatttatattttgaaattatgaatttgctttaatgccgagtgcacctcctggatgatataagccgaaatcagcacgagtaaattttttcaattcagagagtgcaagcgccaccgcatcaccaacaaccagaacaacagtcgacgagcatgacggtgctaaacctaaattatccgcctcacttttgacggggatttcaacagataaatcacaacttatcgcaagcgatgagtgatgactgcgggtaaaagagatcaaataattacccatttttttcaaactaggcagtgtcgccaggatttccgccgtctcaccactgtttgaaataagaataacaacatcgtctttcgccaccattccaaggtcgccgtgtaccgcttccgtaccgtgaacaaaaaacgagggagttccggtactggcaaaagttgctgcgagttttctggcaataataccggacttaccaacaccaataaaaacaacttttccctgacaagattgtaatactttaattaaattagcgaattcagaaagtggggaatcaataacctcttctactgctttaagttcgttatgcataaaatgtttaatgagatggataagatccgtgttattcatttttattctccctgattaatatttttaattacactcacaagacgcgtaagccccatatataatttttctcgaccgcaggccaggttcagacgaaggtagccctccccctccgttccatagacatgccccgccataatgcccactttgccttcatgaattaatcgactgtagaattcatcaaaaggataaccaatagcagaacaatctatccaggaaaaatagcaaccatcagctggccttacgatcaattctggaatattttcattcagatactgctgggtgaattgaatgttagaggcaatatgtgcctttaatgactttaaccatccctcacattcgttataggcaataatagttgcaattatattcagtactgatggggagtttacaaaatcgcgatacctcgatatcgttctgaacttatgattaaaattatcgtcagttgaaatcatatacgatcctgttagtgcaggaacattaaatgttttcgatatcgagttaaatactactactttttctttttttattttaagcgcggatgtaaagctacgattaaaaacaaaatcactatggatttcatctgaacataaccagacattatgccttgtacagcttgcagcgattttatgcagttcttcttccgaccagactgttcctgtcgggttatgaggattacataataacaccatctttgcgcttttaatcttaagatcaaaatcttgccagttgatagcgtagcccccctcattttttataatcaaagaggctgtcagaatatttcgctcgctatgtttaattacatcaaaaaatgcattatagacaggtgtaaaaacgagaatattatcaccatgcgatgtcaataactctattgcttttgcaatagagtacatcacactggggctataggttatccattcaggtttaatatctgtttgatattgttgataataccagtttactatcgcattcagatattcaccatgttgccaacgactgtaccctaaaatcgggtgttccaggcgtttttttaatgctctggtgatagcgtctggtatcggaagatccatatctgaaatagagaatggtagtacatcttttacaccaaatctgtcctcgcaaaagtcccattgggtacaatatgttcctttgcgggaaacaggagtattaaaaacatccatcagtatatccccatatagttatccatatcccgacgcagggcgatgactttagtgccgataatgacttgtagggtattttgatcaagtttaacaaccgcaattccgccggctctttttattgcagcctcgtcaagcaatcccatatctgcgattgttaaacgtaaacgagttacgcaattatccagtgacttaatattctctttaccaccaagtgccttaaccatctgctccgccgcttgcagctctgatttatcaggagttgggatatccgctatagccgtatcctcatgagcgttcagcgtgacaggactggactcttcacggcctaccgtcatcaggttaaatttgagaatagtccaacggaacacaaagtaataaatgaagaaataggccacttcgacacacaccgcgatcggccaacctgttcttgtgccacgcaatacgccaaagctaataaattgaatcagatcgccagtaaatcccatcttcacgcccatatatggcagaaccatgttagcgaatccattcataaaggcatggaagacaaacagcagtggactgacaaataagaacagaaactcaatcggttcgctgacgccgccaataatcaccgtaagcaccccggaaataagcaatgctttgatagcctttctgttttgagcatgagcagtgcgatacatcgccagcgcggcaccagccagaccatactgaatcatcagtttgccctgctccattttccccgccaaatccagcggaatgaccgcattctctttgacgtatgccataaacatgttcagggtgccgtaatattcttcgccaccaatcacagccgaaccgccgattggcgtaaagcggaaaactgacgtcaccagatggtttaagccaaaaggaatcgtcacgcgttcggcaactgcatagaagaaataaccaacaggaccggaagttgaaatccagtgtccaatgagcatgaaaagattgaaaaacggcggccagataaaaggaatgatcagaccaaatccactcatcacaatcagtgtaatgataggcaccagacgtgggccgctataaaaacctaacgattcaggaatgcgtaaattaacgatctttttatacatgctggcgactaataacccagcaacaattccccccaacacgctggtattgtaggactggatccccagaatgatggtttgcccatgtgtcgacatttggtcagcaacgaccaataagtcgtgctgtttaagataaaagttcgttcccagatgcatcgccataaaaccaattaagccagaaaaagcaccataggctttatcctctttatcttttaataatcctaagggaatcgctatcgcaaacaatacaggtaaattaacaaaggcaaacaaaccaagactaacaatgaaatcaagtatggttttaattattggaatagccagaaatggaattaactttgccatatcatcactggctaaaccacttcccagccctagcatcatgccacatacacttagcagagcaatgggatacataaatgccttccccaggctctgaaaaaaactccaggctttcttttgtttcatgtgggttatctcatataaatgttatatataattagtccattaatactttggtacgaatagagagatatagtttttcttctaaaattaattcatatttaaaagtggcatacagataccgttcaatttcatgaattgcgcgctgtaacaggatgtccttttcaagaaactgttcatagatatcaccaatatctttctgttttattttttcattgcataacacgcgacttgaaaaatatttaaggtgcatcataaatctggaatagttaaatgaacttctgtccacctttctgttataaacaacttcaataagctccgtgattatttgcgacaactcaataatccgtactgattcataatcaactgaattttcataattatttaaaatatgcaatgctataaaaccaatctcatcatcaggaagttgaacgctgaattgctcattaatgatagttaatgcatcgcgacttatcgcatactctgctttgtacaacgctttgatttcatcaaggaaaacattattaatttgtatacctgaaacgactcgggatattgcattcgaaatgtgatccgcaagaatcaatagtagcgatggattgagatttttttcgagatttttctccgcatattgcactattttttcggcaacaaacacatactcaatatctacatgttcaatcaatttatagagtttgtttttttgttcatttctgacataaaaaatccggttagccggatgctcagggaccaacattccatattttttgttgtaaccgacgccaggcccagaaatgataacctcctgtccattcatcgatgcctgcacacaattattgttcatgactttttcgatgatcattccatggctccaaaaaaaaaggcaaggcacgtcagaagtaataactacttcaaacattgccttgcctgatttaacagttacaagatgattaactaatgcgtatacattacacggaattgtgcttaattaaagagatggtcggcttatttttcaagccgacattcaaatatccgacatcagtcacaaaaccagcgtctaatattcaggtaaatgttatctattcaacgaaatataaattcattgaataaataaaaacattatccccttctcgccagcgtcgccccatcggcaaaatacgctttaattcccgcaagaatagactccgcaacttcctgctggaaagtcgccgttttcagtttacgctcttcctcaacgttactgataaacgccgtttcgaccagaatggagggaatatctggtgcctttagtacggcaaacccagcctgttcaacttgatttttatgcagcttgttgattttaccgagcttattcagcaccgctttaccaaacttaaggctgtcggcaatggtcagcgactgcaccatatcgaacatggtgtggtcgacatagcggtcaccgcttttgcttacgccaccaatcaagtccgaggcgttctgggtttgtgccagatattttgccgcagtactggttgcgcctttggttgagagcgcaaacaccgaggaaccgctcggctggcgactggtaaaggcgtcggcatggatagaaacaaacaagtcagcgcgctgtttctgggcttttgctacgcgcacttgcaacggaatgaagatgtcttcattgcgcgtcatgtacaccttcatattgccctctttctcgatcagagagcgcagacggcgagctatttgcaataccacgtctttttcgcgcgttttgtatttccccaccgcaccggagtcttcgccaccgtggccagggtcaagcataatgacaatcggacgatcccgcccagctttacccggttgtggaccactttgtgctggcggcacctgcttttcgaggtcgcctttgttgtaatcctccagcagcgccagcagcgggtcctgcatatcctgtgcattggccggatagaggtccatcaccagacgctctttaaacccggcgaccggcgcaagggcaaacagctgcggttttacgttttgctttaattcaaaaaccatacgtacggtttgcgggtcaaattgcccgacgcgcgccgacttgatgaacgggtcgtcagcgcggatttgcgcagccatccccttgagcaccgagttcaggtttacatcttcgatatccaccaccacgcgttcaggattactcaacgcgaactgcttatatttcagctgacgatttgattctaccgtcacgcgggtgtagctggacgcaggccagacgcgcaccgccacgacctggctgaccgcagccaggctgacctgacttacgctcaatagccacatggcacccgcgccttgcagtaaacgacgacggctgattgcagtgttggatcctgacatgcctctcccgagcaaaagaaatctaagctgtgtaacaagtaaacgaccaatttgaccggaaactttagcgaaagacgcataatctgtcatctataaaacggtaaacattctttttatattcacggtattactgataaaaaactcgctcccgcataaaatttacacttgcaccctgcaaaaaaacagaataaaaatacaataatttcgaataatcatgcaaagaggtgtaccgtggtaaaggaacgtaaaaccgagctggtcgagggattccgccattcggttccctatatcaatacccaccggggaaaaacgtttgtcatcatgctcggcggtgaagccattgagcatgagaatttctccagtatcgttaatgatatcgggttgttgcacagcctcggcatccgtctggtggtggtctatggcgcacgtccgcagatcgacgcaaatctggctgcacatcaccacgaaccgctgtatcacaagaatatacgtgtgaccgacgccaaaacactggaactggtgaagcaggcagcgggaacattgcaactggatattactgctcgcctgtcgatgagtctcaataacacaccgctgcagggcgcgcatatcaacgtcgtcagtggtaattttattattgcccagccgctgggcgtcgatgacggcgtggattactgtcatagcgggcgtatccggcggattgatgaagacgcgatccatcgtcaactggacagcggtgcaatagtgctaatggggccggtcgctgtttcggtcactggcgagagctttaatctgacctcggaagagattgccactcaactggccatcaaactgaaagctgaaaaaatgattggtttttgctcttcccagggcgtcactaatgacgacggtgatattgtctccgaacttttccctaacgaagcgcaagcgcgggtagaagcccaggaagagaaaggcgattacaactccggtacggtgcgctttttgcgtggcgcagtgaaagcctgccgcagcggcgtgcgtcgctgtcatttaatcagttatcaggaagatggcgcgctgttgcaagagttgttctcacgcgacggtatcggtacgcagattgtgatggaaagcgccgagcagattcgtcgcgcaacaatcaacgatatcggcggtattctggagttgattcgcccgctggagcagcaaggtattctggtgcgccgttctcgcgagcagctggagatggaaatcgacaaattcaccattattcagcgcgataatacgactattgcctgcgcagcgctctatccgttcccggaagagaagattggggaaatggcctgtgtggcagttcacccggattaccgcagttcatcacggggcgaggttctgctggaacgcattgccgctcaggcgaagcagagcggcttaagcaaattgtttgtgctgaccacgcgcagtattcactggttccaggaacgtggatttaccccagtggatattgatttactgcccgagagcaaaaagcagttgtacaactaccagcgtaaatccaaagtgttgatggcggatttgggttaagcgatgaaaatcgccggatgcggcaggcgtaacactcgtgcgtcgcatccggcaattacgtttattcccgcgaactaaacaacgccgccagaccactgcgccgctcggtgcgcgtggcaattgccgcacttaaaatgcgctcatcggcatacagcgacagacggcgacgcgcgcgggtcactgcggtgtaaaccagctctcgcgttactaccggcgtgcgttgactcggtaaaatcaacgccgcatggtcgaactccgatccctgcgatttatgtaccgtcatcgcccacgtcgtttcgtgctctggcaggcgactcggttgcacagacttaatattgccgtccggcatcgcaaaccagacgcgcgtcccctgcccgcgatccagcgcaataccgatatcgccattaaacaacccaagcgcgctgtcattacgggcaatcatcaccggtcgaccttcgtaccaacgagagtgcggattacgatgaattttgcgcttctgttgcataaactgctcaattcgctcattcagtccagccacgccaaacggcccttcccgcagggcgcacaaaagctggtactcattgaacgcctgaatgattaaatccggctcggcacgcgcttgcagcagatccagataacgcccgtaacccgcaagagcttcctcaagcatcgcaatataatcttcgccactctgtaaaagccgtttttcgatatcagtaaaatcctgctgaaaaacggttttcactgccgttttatcaccacggttaatcgccgcagctaactgaccaatgccagaatcgctgccgaaacgatagcttttttgcagcaggcagaggctgtcgcgcaaagatgccgcttctgtgccagttcctgctggaacgtggcttcccgtcaggcggctcaactgcccggcacgctcggcggtaaagcccgcgttggcataagcgcagatatcgcccagcacagccccagcctcaaccgaggccagttgatcacgatcgccgagaaagatcactcgcgcatgatcgggcaaggcgtcgatcagtctcgacatcataggaagatcgatcattgacgcttcatctaccaccagcacatcaagatgcagcgggttaccggcatgatgacgtaaacgctggctacccggctgcgcacccagcaatcggtgcaaagtgctggcatcttccggaatgcgtttcttttgttcatcggtcagcggtaattgtcgcaaagccttgccgagagattcggttaagcgcgcggcagctttacccgttggtgcagccagacggatacggcagcgttcgccgtcggccatttgaattaacgctgccagcaacttcgctacggtggtcgttttaccggtgccagggccgccggaaatcaccgagatccgccgcgtcagcgccactgccgccgcaactttttgccagttaatttcatcgcttactggaaaaagtttgtccagggtttgcgccagtagagcttcatcaacctcaatggcatgattcacttcgttgaaaaagcgtgccactgtgcgctcgttacaccacatgcgattcaaataaagacgatcgccacagaggatcatcggcgttggttcatctccccggctgaccgcttgtgaagccagcaagcattcttcccaattttgtagctcaccgatttcactgacacaggtcgccaacagcggatgcgatgcctcgttattttccagtcgtgaaagcggcaaacaaacgtgtccctctccggcatcatgacttaatagtgccgccgcgagggtgacggcaggatgttcatctcccgccacggtcagggcaaactgcacgtccagtgggcgtagctgtttgtgctccacagcttccagtaattgcttttgcaatttcattacgcctcctccagggtcataccggcaaacatctcatccatcagggcaatcaacccggcattgggtcgggttgtgtaaatcccctgttgcggatgttctttatcaacaccacgcaggaacagataaataacgccgccaaagtggcgctcatagtcgtaatcagcaatgcgatggcgcagataacggtgcagcgccagggtataaagctgatattgcagatcatagcggtgcgcctgcattgccgctgccatagcctgttgggtgtaagccgaactgtcttcacccagccagttggatttatagtcgagcaggtaataacgcccttcgtggcggaataccaggtcgataaagccttttaacatgccgcgtacctgcatgaactccagcggcgggcagccagcggatagcgggtcaaactggcgaattagtgcatcaagctggctggcgataagcggttcactaatcggcaggtaaaactccatctccacctgtttatcgcgatcggaaagctgattcaggctaacacccgtttcattgagaggtgcctggaggacagccgtgatccactcggtcaacactggttcccactgcgattcaaagccgccgagttccagtttttcctgtacccagttcgggtcaaccggctgggtaaaatcgaggtcttcaaacaaactgtgcaagaatgtccctggtgacgcaccgcgcgggaactgatgcggtgttaacgtcggttcttcaacgacgctgaccacgcctgcggcatcaacatccagccgtggcatcagatcctgagcgataccgtgaccacgctgctgcaaaccggagtagctggtgacacgccagttatcgccgggcaatcgttgtagcgtcctcgcattcagttctgcagttaaaacatcattaacctgccagggctggttatcaccagtttgtgccgtttgccaggcaatatcatcatcgcataacgcttcaatacaggtgcgaagccctgccgcatcttgtggttcccctttttgcagcaaacgcccaagcgcactttggtggacgtcggtgtcactttttttatcgccacgacggcgcaccagcggtgcaacgccgagactgcaatgccaaaccgaacgcgtcagcgccacgtaaagtaaacgcagatcttccgccagacgttcggcctccgcgaggtcgacgctttctggcgcagcattaagatccagaacggcctcaaacgagtggcgatcgtgatagaacgcctgatcctggacgcggaaattggtaataaatggcaaccagaccagcggatattccagcccttttgatttgtggatcgtgacaatctgcaccagatgtttatcactttcgaggcgcatttgttggctggaggcattactgtctggctcgaggatatgttgcgataaccagcgtaccagcgcatgttcactttccagctgcgttccggcttcttgtagcagttcgctgatatgcaagatatcggtaagacgccgctcaccgcctgccgttgccagcaagttttcagcaatgttacgcgccgacatcagcgcccgcagcatcggcataacgccacgtttgcgccagatttgccgataaccatcgaactcttcgactaccgcatcccacgcatgttcgtcattattcagcgtttcaatatccagcgcattcagccccatcattgacgttgccagcgcactgcgcagggtgttctcacgttcgggtgtcatcaccgcctgcaacagccaaagcatctcctgtgcttccagagtttcaaaaacactgtcgcggttcgaaaggtaaacggaagggatttccagcaacgttaaggcatcgcgcacctgggcggcctcctggcggctgcgcaccagcacactgatgtccgaagcacgtaccggacgtgcatcatcgccgttcatcagcaacgcttccccgcgctgcccggcttgtagccagtcgcggatttgcgcagcacatacctgcgccatggtactttgatagtcgccaacgccgcagctttcgccttccatcagccacattttcatcgcaggctgcgtttcacctttaaatacaaaacgtaacgcctgatttttgccggcagatttcacaggaataaacggtatttcacgaaacatgaacgcgtcatcagtctggctgaaaagtttgttaacgctgttcaccattcccggtgcggaacgccagttggtatctaaggtgtagtgagcatgaacttcgctacgcgccttcatataagtgaagatatccgcaccccggaatgcatatatggcctgtttcgggtcgccaatcagcaacaatgcggtttccggctgatggtgccagatacggcgaaaaattcgatactgttgggggtcggtatcctgaaattcatcgatcattgccaccgggaatcgcgtacggatcgccgctgccaatacctcgccgctttcactacgcagcgcggaatcgagccgacttaacatgtcatcaaaacccaattcgccacggcggcgtttttcacgcgctactgtttcgcggatctcagccaatgcgcgagtgatcaccagatcgcggatcgacaatggttctgcaagcagttgatcgatcgcctcaaacagtggatgtcgcggggtttcccccccggctttcgtgcgatcttctaagaaacgctgagagaatttttccagcgactctggcaactgataactgttggtctcttcttctgcccaggcgctgatcttgtcgatccatttagcctgattgctacggttaaacttgcgtcgatcaataccagaagattcgatcagcgcatccagttcacccactgcgtcgcgccactgctgttttaccgtatcaatacgcgccacaatttgcgcgtggcgggaagccagcgtttcatcatcgggcggcggtgctttgataaccggtgcttcgccttgcagataacgattaatatcgcgcagcaacgcctgcggccctttccaggtttcaaagaccacctgggcaatttcacgcgtcagcgggtagcagtggcgacgccagaaatcggcgcaggcctggtagcgtagcagagactcatcttcaatcagctgctgctcaaacagcatgccggattcaaaggcattcaggttgagcatgcgctggcaaaaaccgtgaatagtaaagactgccgcttcatccatctgccgttcggctaacaacaaccactgcgcggcttgcgctttatcgtcgatctcttccagcagacgtgcatacagcggattgtcagtggtttcacgcaggcaggcgatacgcaactcgtgaatattgctacggatacgaccgcgcaattctgccgtggcagcctcggtaaaggtgaccaccagcagttcttcaacggtcagcgggcggggaaaggcggcggaaccgcctagcccaagtaacaggcgcaaatagagcgctgcaatcgtaaaggttttgcctgtgccggcagaggcttcaatcaggcgctcaccctgtaagggcaagcgcaaaggatctagtgtctcggcgacatcactcattcttttcactcatcaggggcattgtttgctgcaacgcgctgacgttctcccacactttccagccttcaggatgcacatattcggctttcccgttctggctgccggaaatctgcgacagaatagccataccttgcggctcgaccaccgcctgatggaagaaatcagcaagtttttgcggcgtcagcagttttatctgggccacgattttatcacgcgaatcgaagcgcatattgccgcgatcgaaatctttacttaacttcgatgcttcttcgccgagcgtttgcggtgcctgcagcatctgggttattaccgcctgctggatttgcgcaaactcttctggcttcatcgtccgcaattttgcctctgcggttgggaaaaacgccttgtaacgctcccacaagaatgaaggctgtttatcattgctttgcaaaaggaagcccatgccccactgacgccccacgctcattggaaacgcaaacacggcatagcccaactgttcttcggtacgcaactgattgtagaaccacggctgtacgatctgccccaacagagagctataggctgagctggtgtattcatcgtagccagtcggtacaaatatcgctgccagtgcggagtcggtgctgttaccagctttttcaaagatgacggattgttttttatcgaccacgacatctttgttacgacaccactctgaaccatcagcgcccaactgtttttgcacatggcgtgccagcgttgttgcctgggcttcagtcatgttgccgataaccataaactctggtctagcccctgattttaaggcgtcgcgataggccagcacctctttcaacgtaatggagggcaaaattttgcgccgttcatctcgcgagaagtacggcacttgcgagagcatctgcgcgggcataatcgcctgctcaaacgctttgcccttttctgcggaatccatcatctggttataccaggacttcgcctgctcaagctgatcttccgtagcggtatagctaaagtagccctccagcagagcctggaacagctgcggcaggcgctgagtgtaaccattggcattaaccataaggccgttgttagcattggtggaaaaacttatgccaccaaccgacgcctggttgcttaactgatcaagcgccagccctgcgagataatcattgagcgcaaacatcacctgattgcgggcgctgtccatggctttcggattacgcaaaatcaggctgacatcagctttgggctcactggcaaaataacggcttggcgcatacaccacgcgcagattcgactcatcaacaatcaactctggatggtcgtatttcttctctgacttaatcagcgagaaatcgtcaggaatataggggttaagctccggtaaggagagcgcaatattggcggcttttttctgccagtccgcgaaagtttgttcgctgattttatcgacttgatacggcgcatcgacaaaataagccgttttattgtgcggctctttcgggctgatataccagatacgcgcattctgcggcgtcatcatcgccagacgttcttttactgctttagcatcgtaccgatcggcaatattgactgcatccagtgtatgctcaacaggaacgcgaatcatggtatcagccagccattcgacgtaatccatatcacgggtgattgacggataacggaagtcgatatccagcacattcgccagttcatcgaagtattgtttatcgatccctttttcacgtaacagattgagatagctaaaaatggccgccacaacctgatcgcgattcgccagacctttatcggttaaagacgcagagatcgctaatacgccgctgttgccgttgacgataggatcggaattggcgctaataccctcaactaatccctgcttttgcagccagtcagaaagtgtaccagggctgcgattaccaatcagataggtaatcaattcatccgttttactacggaacttcgctgaattgttatcgatgcgaaactcaacgcgcagaactttacgcggcaacgccgggacgtaatgaatgataatgcccttttgcgcgtcggtgactaccggcacggtgatttccggttttttgctctctttgttcggcacgcgaccaaaggtgtccgccgccattttcgccaactccggcaacggtttattgctgtaaataaccgccttcatcagattggcggaatagtacttctcgtggaaatctttcagcgcctgctgtaccggattacctggtttgtcgcttaaagtttcgaggttaccaccagaaaactttgaaccggggtgtgccgggttaatggtttctgcgctgacctgtgccatgcgcatcccgtcacgcgtacgcgccatggttaattcggcattcactgcattacgctcacgttcggcgtatttcttgtcgagcaagggttctgcaatagcatcggccaggcggtctaccgcaccgggtaaggcatcgttctcaacttccagatagaaagccgtgcgatacggtgccgtgctggcattgtgactgccgccgtgcattttgagatattcggccagactgtcagcctgcgggtactttttcgaccccatcagactcatatgttcaaggtaatgtgccagcccctggtacgcctcaggatcttccagcgacccaacgggcaccaccagcgccgagagcgatttaactgcctgcggatcagaaaccagtaagaccaccataccgttatccagacgtatagcctgatactggcggttatctttatcacttttacggatggtttcctgaatcggctgccatcccgtttctgcctgacttaagggtgcccagagggcaacaaacaacaataatgctttgaaccagatgctgcggggcattcacggacctcataatcaactttattttctggccagattcaacacgttaacgcaaatcatctgccagaatttaatcttgtgctgcacgagtcagcctatgtctatataaccatcagtccgtgactggtgcgcatcataaagtaagcggatagattgcgcaatttttatacaatactcatgactgattaaagcgaaacagcggtaacaggaaacgttgcgactgttcaacgatagcctccattgtctctggtgttaattgccgccagagccgttgataccagatatcatcaccttcgccacgcaccatcatgttgccttcgtaagcctgaaggaatttcgtacgggctttttgcaacgtggaatcgtcatccagcatggcatcgttttgcgcgtcataacaggtttttagccacgcgccgccactttcaggtaacaccagcaatggcgcggacattccttcacgatacccttcaatcagctgtgagaggtaatgtaaagcctgttcggctgcaagcggcggaaaacgccactcgccgtctttgcgtagaaaaaggcgactttcaccattaccaccgctggcacagtagacaaggtgttccagccaaagttgcattccctgcgccacacttaataaagagggacgccagcgcaacaggccatccggctgcacctgcggcaaccagccagttatctgcacaccgttgcaggcgagatcaatctccatactctgccctggctggcgacaggcaatgactctgtcggcaagttgctgcatctcctgacactgcgtttcccagaaaatttcaccaaaggcaccatacggcaaatcacctgccgcccggaatcggcggaacaagcgttcggcatcatcctgctcaaccagtacatttaataactgctggttgatttgataacgactaagcccttcaagaataaaaggttcggtgtcggggatttcgctgtcttcggtacggaagttcacctgcaaacgcatctggaaaaatgcccgcaccggatgtgcccagaatcgttgtagcgtttccagcggcacggtttccggtaaggtaaatggcagcggctgaacaaattcagaatgtgctttaccagcctggctggccgcaggtagccattcacgagcatagctttgtcgttcgcctggctggtagttttgtggatcaaacggcattcgggtatggaggcaagtaagatgcgcttttacccttgcctcgctttcatcacagttgagcgcttcatcgcccggtagataatggctttgcccgatgtagtcaatcagttcctgcaccagtaccgacgggaaacgttcactgttatcctgaatggaacgcccgatatagctgatatagagtttttgctgcgcggaaattaacgcttccaggaacagatagcggtcgtcatcgcgacggctacggtcgccacgcttcggtttctggctcatcagatcaaagcccaatggcgcaagctgacgtggataaacgccgtcgttcattcccagcaggcaaaccactttgaacggaattgaacgcattggcatcagagtacaaatgttaaccggtccggcgagaaaacgctggctgatacgttcttgatccaggcgcagtgccagttcatcacgcaatagtgacagcggcaccgcgtcgccatactgcgcacctaaaccttcggcgataatcgcctgccattgttgttcgatcagcgtcatcgccgcttcggtttccgcatccggcaggaaaaaggcgttgagcatatcgcgacaaaccggcaaccactcttccagcggacgctcctgcgccagcccgcgacgccagatatttagctgcattagcagtgaagccagatgccccaccagttctgcaattaagccgctcgattcatcataaggtagaaccgattgccactcgccctgcgcgctctccatcgcgtagcccagcaacatgcgcgtcaggccaaaccgccaggtgtgttgaccggtagcgggaagttccagctcgcgaacgttgtcgtcatctatcccccaacgaattccggattcgttgacccactgacgtaaataacgcagcccttcttcggtgatgtcaaaccgcgctgccagcaccggcacatccagtaatgccagcacgtcttccgacacaaagcggctgtctggcagcgataacaggctgataaacgcttcaagtacaggatgcgactgccgcgcccgacggtcggaaatggcgtaaggcaggtaacgatccgcaggtgcgctaccaaacacagcctgaataaacggactgtagctgtcgatatcagccaccatcacgatgatgtcgcgcggagtaagtgtcgggtcttcctccagcatcgccagcaggcgatcgtgtaaaacttcaacttcacgctgcgggctatggcaaacgtggaaggtgatactgctatccagtggatcaagcgggcgtttgttatcgctacgggaaaactcttcgatgttcacaccagcaacggcgcggttttccagttccagaatgtcagactgaatattatgcagcaggttatctggcgtcacatcgacaaaagcgtccagctcctggctgctctccaggtcagaaaggagataaatgtagtcgcgcccaagcttgccccatgaagccagcagcgggttgccgacatcctgttcaccatcgctgttaaagagctgcccggcattttcgctgtcgcgaaatagcggtaattcgcgatcttcaaaactgtgtcggcgctggcgagtcagtagtttcgccagataagcaggatctttaatgtcgccccagtaataacggcaggggttggtaaacaggagatggatttcaatatgtttacccagcgcctgtagcgcctggagataaacaggcggtaacgcggaaataccgcatataaagacgcgcgaaggtaaccccggcgggcaggtcgtcgcggactccagcgtttcgataaagcgctgatagagattggcgcggtgccagcgcggttgcccaagttcgtcggtatattccaccaacgccttccacaacggcgcttgccaggcctgtgcttctcccaacccttctaccagatgtcctgtttcccactgtgccagccagtccggacgatagaccagatactggtcaaacaggtccgccgcttttgaagaaagctggaacagttttcgcttgtcactatcgtcagtcagataatgccgcaacagggtaaagtcttcgcgctccaacagttgcggcagcagagtcatcagtttccagctcatgctctgtttgttaaaggcgctctctttggggatctccggtaatacccggacgaacatatcccagataaagctcgctggcagcggaaaatcaatgtttgccgcaataccaaacttttgcgacagggtcatttgcagccactgtgccataccagtactttgcaccagaatcatctctggttcgaaaggatcgtccagtcgttcgcgttcgacaataaactccatcaacgcttccagcacgtccagacgattggaatggtagacccttaacatagcggctcctgactactgacgattcgggcaatgcaggcgggtcatctcgccttctctgcccccgggtgaaactagcgtaacgctgatgctgacacatcccgcctgcgatgtctgcattcggttgacctgccagttagcaggtggcgaaatcgcgcgcagttgcgtttgctgccagccatgccgccagagctgttggtactggtttctgctggcaagactgttcattaatgttcgctggaaacccgataacgcagtgacaatcatcaccatcaacaccatcgccaacattacctccggcagactaaagccttgttgattcctcagggaagctgacataacgccctctctttcagcggacaaaaatcgctccagccgcgtggcgaaaaaacaatgtttccatcgatgacttcgcctgttcgccacaacgaaacgccttcataaccagcaatcaataaggcttcattatctgccagtaaacgcagacaaacccgggcaccggtggcagcatacagtaagcactgaactgcgggcagcgtctgccaggagtgcatttttccccactccagcgccgactgaacgatggcctggcggcgcaatgactgactttccatgctcacgcgagaagcaaaactgcgatcctgctgactcattccttgcaatagcaagctacccaaaatcagcagcatcaggaccagagccagtgacgaaacacccttttcgcggttcacaggttggatcctgtcacgctatagctggcatccaccacggtttgcggatcagccttgctggcagcgtgcatattaaccgtcaacaccggcgagaagccgctgacatcctgacgtacgacctgaaaagtgtcgataatgatggcatccggattagtgactttatcccagcccttaccttcacaggatgtcgcaccgcgtagcgtttccagcacatgctccttcagacgaaatccaatctggtcggactcttttaccggttcgcgatcccagataccattactgttcgcatcccactgcacaatgatacagtcaccctgtccgacaatttccagcccttcgcccgtacagctgccatggcaataacccgccctctggagatgcttcgcgacggtaaatacccgcagccagatttcatcttccagcgccagcttacgggtgttcgttaaactttcacgctgtaacgcaggcagaaagcgtgcagcccccagcaacaatacgctactgatcgccatagcaatcaacacttccagcagagaaaaaccttgctcttttacaggcatccttctgtttctccttgctgacaaagccggagtcttccccacggcgaaaccaccagccaccactcgcccgttgagtttttgaagcgaatatgcccggcccatgcggtattgcgcaggccaaagaaagcaagcgaaggtgtcaggtcgctcatttcgacttcgggccagcgcggcacaaagaccaatggtgaactgccatgacaggtattcgccccagcaacggaactcacaaggcaccataacgtcccctccctgataagactgatactgtggtcgcggttatgccagttggcatcttcacgtaaatagagcaaatagtcccgcgcctggctggcggtttgccaaagccgttgcgactgctgccagtattgccagccatagagcccacttgcgcttagcatgaccagaatcagcatcgcgaccagcgtttcaatcagcgtataaccacgttgtgttttcatgccggcagtatggagcgaggagaaaaaaagacgagggccagtttctatttcttcggcgcatcttccggactatttacgccgttgcaggacgttgcaaaatttcgggaaggtgtctcgaagaatttaacggagggcaaaaaaaaccgacgcacactggcgtcggctctggcaggatgtttcgtaattagatagccaccggcgctttaatgcccggatgtggatcgtatccttcaatctcaaagtcttcgaaacggtagtcgaagatggattcgggtttacgtttgataatcaacttcggcagcggacgcggttcgcggcttaattgcagatgagtttgatccatatggttgctgtagagatgcgtgtcgccaccggtccagacaaaatcacccacttccagatcgcactgctgcgccatcatatgcaccagtaacgcgtagctggcaatgttgaacggcaggccgaggaagacgtcacaggagcgctgataaagctggcaagagagtttgccgtctgccacatagaactggaagaatgcatggcacggtgccagcgccattttatccagttcgcctacgttccacgctgaaacaataatgcgacgggaatccgggtcgtttttcagctggttcagtacagtagtgatctggtcaatatgacgaccatccggcgttggccaggcgcgccactgtttaccatacactggcccgaggtcgccgttttcatcggcccattcgtcccagatggtgacattgttttcgtgtagataagcaatgttagtgtcgccctgcaggaaccacagcagttcgtggatgatggaacgcaggtggcaacgtttagttgtcaccagcgggaatccatcctgcaggttaaaacgcatctgatgaccaaaaatggaaagcgttccggttccggtacggtcgtttttctgtgtgccttcgtcgagcactttttgcatcagttctaaatactgtttcatggttcctcaggaaacgtgttgctgtgggctgcgacgatatgcccagaccatcatgatcacacccgcgacaatcatcgggatggaaagaatttgccccatgctgatgtactgcacccaggcaccagtaaactgcgcgtcgggctggcggaaaaactcaacaatgatgcgaaacgcgccgtaaccaatcaggaacaagcctgagacagctcccattgggcgcggtttacgaatatacaggttgaggataataaacagcaccacaccttccagcagcagctcgtaaagctgtgatgggtggcgcggcagcacaccgtaagtgtcgaaaatggattgccactgcgggttggtttgcagcagcaaaatatcttctgtacgggagccagggaacagcatggcaaacgggaagttcgggtcaacgcggccccacaattcaccgttaataaagttgcccaggcgcccagcaccaagaccaaacggaatgagtggggcaataaaatcagagacctggaagaaggaacgtttagtacggcgggcgaagataatcatcaccacgataacgccaatcaggcctccgtggaaggacatgccgccgtcccagacacggaaaagatacagcggatcggccataaactgcgggaaattgtagaacagaacataaccaatacgtccaccgaggaagacgccgaggaagcccgcatagagtaagttttcaacttcatttttggtccagccactgcccggacgattcgcccgtcgtgttgccagccacattgcaaaaatgaaacccaccagatacatcaggccgtaccagtgaagcgccacgggtcctattgagaaaatgaccggatcaaactccggaaaatgcagatagctactggtcatctgtcaccacaagttcttgttatttcgctgaaagagaacagcgattgaaatgcgcgccgcaggtttcaggcgctccaaaggtgcgaataatagcacaaggggacctggctggttgccggataccgttaaaagatatgtatatgatccgcgctataaccccccgcgaatcagcccgcccatgccgcgacgctccataaaggcagcaacctgatggcgaacttcggtcgccagttgcgcttccagactacgctgcgcaagattttctgcttcagcaaaatcaatgcgccgcagcaggtattttacgcgcgctacagaacgtccgttcatagacagatggcgatacccaagcccaatgaggattgccacgcacatgggatcgcccgccatttcaccgcacaaacggagatcgattccatgtatttccgcttcccgggcgatcatcgccagagctcgtaacattgcaggatgaagactgtcataaatgttcgccacccgggtattgttgcgatcaacggccaggatgtattgcgtcagatcgttggtgccaacagagatgaaatcgacccgctttgccagatgcggcagcataaataccattgacggcacttccagcatgatgccgatacgtggtttgggaatttcgtaaccgatcatctcctcgacttcacgtccggcacgttcaatcaggcggcgtgcttcgtcaacttcatcgaggcttgtgaccatcggcaacagaatattcaggttgcccgtagcggcattagcacgcagcatcgcccgcacctggatcaagaagatctccggctgatcgagcgtaatgcgaatcccacgccaacccaggcatggattctcttcgctgatcggcatgtaaggcagctgcttatctgctccgacatccagcgtacgcaaggtgacgggtttatcattgaacatttgcagcatcccctgatactgcgccacctgttcttcttccgacggaaaaccactttgcagcatgaatgggatttcagtgcgataaagtcctatgccatcaatacggctgcccagtttttcttcatgttccgggcttaaaccggcattgagcataactttaatgcgctcgccgctttttaactgggcgggtaaattgacgtcatcttccgccagacggctaagctcaatctcttcactaattagccgctgatattcttgcagcagtaccggctccggatcgaccagcaattcaccgcgataaccatcgacgatcagcgtccgacgatgcagtaccgaaggctgaatatccgcgcccatcacggtaggtatccccagcgcacgtaccatgatcgcagcatgggagttggcagcgccatcgcgcacgacaacaccgactaagcgatcctggggcagctcagcaagcgttgtcgctgacagttcatctgccaccagaatgaaacgttccggccaggcgttcggcccttgattagcgtcatcaagatgaaacagcaatcgctgacccagcgcacgtaaatcgccagcccgctctttgagatagttatcgcttagcgcggcaaactgttcggcaaatttttcaatgaccgtttttaccgcccactctgccaccgagcctttatcaacctcggcaaacaattcgcgacgcagccgggtatccgaaagcaggtgtgagtaaagatcgaaaatagccgccgtttctttttgtgcaccggcagcaaagcgtttgctatagcggcgaaactcgttagccgcctcttccaacgccccggtcagtcgttcgcgttccagagccggatccagcgttgatgcctgatacacctgttccattaaaggtaacgtggcatcctgccagccttcggcaatcgccacaccaggtgctgccggtaatgcacggattcgcgtctggcgatattgcccaaacaaggcagtcaactgcgactgagaaagaatagctgccatctgggtggcaagcgtcaccaggaaggattcttcactttcgtcatactggcgcaactctcgttgctgtaccaccagtacaccaagcaactggcgacgttgaataattggtacgcctaaaaacgcgcggaaacgttcttcttttacggaggggatgtatttgaagctggggtgcttttgcgcatctgcaaggtttatcggttccgccagcctgccaaccaggccgacgatcccttcatcaaacgcgagcgttacagtgcgaccgcgtggttttttcagtccccgggtcgccatcaggtagtaacaacgtcgatcatgatcggccaggtagaccgaacagacctcggtatccatcgcaagacagatgtcggtaaccagaatatttaacgcctcattcaggcgtggtgcgctggctaccttttcgactatttcgcgcaggcgagtgagcataattggcgtgacttaacctcttttacgtcgataagcagatgcgttttgtggttttggcgtattttcctgcagtgacatcaccacactcgcgaactctttcattaccctacggtagacatcacgtttaaatgacaccacctgtctgactggataccagtaacttacccatcgccagccgtcaaactctggtgtactgctggtttgcatattgatttctgcatcgccgctcaccagctgcaagagaaaccatttttgtttttggccgatacaaaccggcttcgtgtcccaacgcaccaaacgtttcggtaatttgtagcgcaaccagttacgcgttgaagcaaggattcgaacgtctttgcggcttaatcctacttcttcaaacaattcacggtacatcgcctgctctgcggattctccggggttgattccgccttgcggaaattgccaggagtgctgaccaaatcgccgggcccacattacctgcccctggcgattacaaatcacgatacctacgtttgggcggtagccatcgtcatcaatcaccggactacctcaaaataaagctttatatacgaatgattgtttcatactccaggaagacggtaaaccactctctgcagggcattacacactaataacaattgaataactcacagttatgtgcagagttataaacagaggaaggggtggatagccgtttttattcaccttttctgtggatagagttgtgaagaactacggaattactacgggaaaacccggagcattctgaataagacagatacagagattttaaaatattcattatcagtcaatgcattacatgtgatttgagtaataaaaaagagtaattcgtgacccaggtcacacctctcatttacgtgttggcgaaagatcaaccaatgccgtatttatccacagaatgtgccactaagttaagcactgaaccactaaaaactggagtttcgtcgcacgtcaaggctgtaaatggaaacagtagtggaggtttttcacagttatcccagctttctgtggataacatggtgtaagatcctgtttattttcagtgaccagatttggaaaacccgttgcagtgttgcgcaactcgtttaccggcaacctaaaaagcaatataaatcagagaattgaacaacgcatgtggaaaaagttacactgcgaatattcagcacataattgctgtttgttttttaaccaaggtatcatgacatgtcccaacctcgcccactgctctctcctcccgaaactgaagaacaattgttagcgcaagcacaacaactttctggttatacattgggagaactggcggcacttgccgggctggttacgccggagaatttaaaacgcgataagggctggattggcgtgttactggagatctggctaggtgccagcgcagggagtaaacctgagcaagattttgctgctctgggcgtggaacttaaaactatccctgtggatagtcttggtcgtccactggaaacaacattcgtttgtgttgccccgttaacgggcaatagcggggtgacctgggaaaccagccacgtgcgccacaagctcaaacgcgtgctgtggataccggttgaaggcgagcgcagcatcccgctggcaaagcgtcgcgtaggatcaccgttgctgtggagcccgaatgaagaggaagaccggcagctacgcgaagactgggaagaattaatggatatgattgttctcggtcagattgagcggatcaccgctcgtcacggggaatatttacagatacgaccgaaagcagcgaatgcgaaagcgctgaccgaagctattggtgcccggggcgaacggattctgacgctgccgcgcggattttatttgaagaagaatttcaccagtgcgctactggcccgtcattttctgatccagtagccatcgctttgacctgctgctttccgggcatataattaccgcttcatttttttggcagggctttttagatgttatttgcatggataaccgatcctaacgcctggcttgcgctcggtacactgacgctgctggagatcgttcttgggatcgacaatattattttcctttctctggtggtggcaaagcttcccacagcacaacgtgctcatgcgcgccgtctggggttggcgggagccatggttatgcgtctggcgctgctggcatccatcgcctgggttacgcgcctgacgaatccgctttttacaatattcagtcaggaaatttccgcccgtgatttgatcctgcttctgggtggcttgttccttatctggaaagccagcaaggaaatccacgaatccatcgaaggtgaagaagaagggctgaaaacacgcgtttcatcattcctcggcgctatcgtgcagattatgctgctggatattatcttcagcctcgactcggtgattaccgctgtgggtctgtcagatcacctgtttattatgatggctgccgtggtgattgccgtaggcgtgatgatgttcgccgcgcgctcgattggtgattttgtcgagcgccatccttcggtaaaaatgctggcgctctctttcctgattctggtgggctttaccctgattctggaaagtttcgacatccacgtaccgaaaggttacatctacttcgcgatgttcttctctattgcggttgaaagcctcaacctgattcgcaacaaaaagaatccgctctgatactccgtacgctctcctgcgggagggcgtactcactcctgttaccctcacagtttaagattttcctgctttcaagatatataacgtcggtttataaacagactattatcataggtgggccaaatgaggataaccggatgaaaaaatgggcagtaataatttctgcagtcggactggcgtttgctgtttccgggtgttccagtgattacgtcatggcgaccaaagatggccgtatgattttgaccgatggaaaacctgaaattgatgatgataccgggctggtgagttatcacgatcagcaaggtaacgcgatgcaaattaaccgtgatgatgtttcgcaaattattgaacgttaacaaataaggtcagcatccggctggccttaagatttttctctttcccttttcccttccctctgccatttttatattccttatgtcgtgattataaaaaggaaacggctatgcaatatcaccgtataccccacagttcgctggaagtcagcacgctggggcttggcacgatgacgtttggtgaacagaacagcgaagccgacgcccacgcacaactcgactatgccgtcgctcagggcattaaccttatcgacgttgccgaaatgtacccagtacctccgcgccccgaaactcaagggctaaccgaaacctacgtcggcaactggctggcgaaacatggcagccgcgaaaagttaattatcgcctccaaagtgagcggaccgtcgcgcaataatgacaaaggcatccgcccggatcaggcgctggatcggaagaatatccgcgaagcgctgcatgacagcctcaagcgtctgcagactgattacctcgatctctatcaggtgcactggccgcagcgcccaaccaactgcttcggcaaactcggttatagctggacagattctgcgcctgcggtttcgctgctggatacgctggacgcactggcagagtaccaacgcgcgggaaaaattcgttatatcggcgtgtcgaacgaaactgcatttggcgtaatgcgctacctgcatctggcggacaaacacgatctgccgcgtattgtcaccattcagaacccctacagcctgttaaaccgcagttttgaagtaggtctggcagaagtcagccagtatgaaggggtcgaactgctggcctattcgtgcctgggtttcggcacactgaccgggaaatatctcaatggtgcaaaacccgctggcgcacgtaatacgctctttagtcggttcacccgctatagcggtgagcaaacgcaaaaagccgtcgcggcgtatgttgatatcgccagacgtcatggcctggaccctgctcagatggcgctcgcatttgtacgccgtcaaccgtttgttgccagcactctgctgggcgcaaccacgatggagcagctgaaaactaacgtcgaaagtttgcatctggagttgagcgaagacgtattagctgaaattgaagcggtgcatcaggtttatacgtatcctgcaccataagattaacgccggttaaaaccggcgttaaatattaatgacggcgctgccagatccacagcgccgttattgccagcgcaaacagcgcaccgaagccaatgccaatgggcacgaccgggatgcctaccattaccgccagcgagtaaatgcccagcatcaacaacatggcgctgttttcgccaaggttttgtactgcaatcgcattccccgccccgacgctttttttaccccgctcctgtagcaacgcattgagcggaacgacaaaaaagccccccagcacgccaatcagcatcaacaaagcataggctggcagcagctcgtgttgcagggagaaaatcagtaccaccacgccaatcaaaatcccggctggcatacagcgtgacacggtttccagcgtaaccagcttcgctgccgcacctgcgccaaccacgataccaatcgctaccatcgcgttgagataggtcggcgtagcgttatcggtaatacccagcgccaccggtacccacagcaccaacaggaaacgcagcgtgacacctgctccccagaataaactggtgcccaccagcgaaaaacgcgtttcaccattgcgccatagcgaggtgcaggcattcaggaaactgcgggtcatgctgatgagattccaggactgccccggacgcgccgccgccagtttgggaatgtagatattggcaacgaccgcgccaccgtaggccagtgcgcatgcggccagggcaaccagaatatgccagtcagccagaacaccaccagctacggaaccgagcaaaatcgccgctatggtagacgcttccattaaaccgttagcttttactaacttactacccgtggttaattcgccgagaataccgtatttcgccggtgaataggctgcagcaccaacacccaccaacgtatagccgagaaacggattgataccaaagcagatactggctgcgcccagtagcttcaggccgttggcaaacatcatcacccggcctttggcgaagctatccgccacctgcccgacaaacggcgcaaaaagaatgtaagcacctacaaacaccatttgcaggatgggctggctccactccggatagaactgcgctttcagtaacgccagagtggcaaacagcagcgcattatcgccaaacgcagagagaaactgcgccacgataaccgctttcatccccttcgaccacaacgaagtgttagtgtgcactgactcactcatcgtgttgttccgcttcgtctacccagcttttcaacgtgacaaagtcaggtttgccgctgccaagtaatggcatctgtttcagatagcgaatatcgcgcggtacagcaagctccggcacgccgtgctcgcgggcatactgttgtaacttatcgcgcgtcagttcgttatctgtggtgaaaagcaccagtgcctcgcctttgctggcatcgctcttaatcgcagtggcatggactttatctggcgaaacaccaagtgccagttgttccaccatttccagcgacaccatttcgcctgcaattttggcaaagcgttttgcgcggccctgaatctgcacaaagccctgctcatcaaaacgcacgatatcgccagtgtcataccagccgcgctccatttcgccgcgaacattctcggcggtgggcacttccagtacaccaggcttctccacccgcagatagccgttcattatgttcggccctttcagttgcaggcgtccgccctcttcgataccaggaactgacaacaggcgcgcgtccatacctggtagaatacgccctaccgtaccgggtttcgccgccatcggtacgttgatagaaacgacaggcgcgcactcggtcacaccgtagccttcaaggatgcgcaggccaaatttatcctgccaaagctgtttggtactttcttgtagtttttctgcgcctgccaccacatagcgtagacgatagaagtcatacgggttggcgaaacgcgcgtagtgaccgaggaaagtcgaggtaccgaacaacacggtgcaactgcggtcatacaccaactccggcacaatgcggtaatgcagcgggcttggataaaggaacacttctgcacctgtgagcagtggcgtaaacaggcctaccgtcagcccaaaggagtgaaacagcggtaacgccgacataaagcgatcgttggtggtgaagtcggcaatcgttttaatctgctcgacgttcgccagaatgcttttatggctatggacgacgcctttcggatggccttcagaaccggaggtaaagaggatcagcgcctcttcttccggctgctgttttaactgtgccagacgcggcatcagcaaatgagcgaaaatccacactttgtcggcagtggtgacatctgcttttaaatcttccagatagacccagcgtacctgagtaagttgctccggcagatgccagagtttgcctttatcgagaaactgacgggaagtgaaaatggttttgatttcagccgccgtaatagcactggtcaacccttttaccccggcggtgtagttcatcattgcgggaatgcggcgacgggcgatggccccaaaaatcactgcagcactgatgcctgcattgggcagcattaagccgatgcgttcgccttcaacactgtatttttcaaggatgcgtccaacaaacagcgttttcgtaagcaatttgcgataggagtctggggtaaagttgacgtcttcgacacatttcttcccggctccgaagcggtacattgcactcagtaaagattcgtacagcgtttcacgcgggcgcaccgccatacgcgcttccatcattatttgatgcagcatttcgccagcgattttgcgacggtcacgggcacgcggcgcatccggcatctccacctgcgttggtggcaaaatatgcagagtaatttgcgggaacaagcgacgtttaaccagacctttcaggcggctgaagtgcgtaagttccgccccttcaatacgcacaggaataaccgttgcaccagacttcgccgcgacaaatcccgcgccatcgtagattttcatcagcgagccagtggtggtgatgcgtccttcagggaaaatcaccactggtcggccctgttccaccagacgtaccagatgtttaatcgccataggttgcgtcgggtcgagaggaacaaagtcgataaatgatttcagccaacgcatataccactgttggcttattgaggtgtaaacggcaaataccggacgtacgggtaaaaacaatgccagcagtatgccatcaataaaagagacgtgattaggcgtaattagaacgcgctcgcccttcagtgccttggtgtcacccgtaacgcgaacgcgatacaaaacacggcacaaatttcgaaaaaagctaaaaagcattccaactccctttgctctgattcagtaaaagcgaatggagggagattacacgagataaagaacgcgagcgacagtaaattaggtgcgaaaaaaaacctgcgcatccgcgcaggttggtgcaagagacagggtacgaagagcgtaccgaataatctcaccaatcaatacctctgggatcttgattgtggtctgcacgacgactcttcgccagcgagaaaacgcaaaggaatgaagggaaatgcaacgaggtgtgtaaattgtcggttactgttacagattgatgaccggcaaaaaaaaacctgcgcatctgcgcaggctggtgtaattcatgtgctcaacccgaagttgacttcacctatcaatacctctgggatcaccactttagcaacctgaagccaaacgccaccagcggtcaatcgcaacagcgtttcgcaaagtgtaaccaaaggtttgcaatctctttttttgtcttacttatttgcgtttggctcacattcccacgatgaaaacatgtcaccccttgaaccaacgggcgttttccgtaacactgaaagaatgtaagcgtttacccactaaggtattttcatggcgaccataaaggatgtagcccgactggcaggcgtttcagtcgccaccgtttcccgcgtcattaataattcacccaaagccagcgaagcttcccggcttgctgtgcatagtgcaatggagtctcttagctatcacccgaacgccaacgcccgtgcgctggcgcagcagaccactgaaacgatcggtctggtcgttggtgatgtttccgatccgtttttcggcgcaatggtgaaagcggtcgaacaggtggcttatcacactggtaattttttattgattggcaacggttaccacaacgaacaaaaagagcgtcaggccattgagcaactgatccgccatcgctgtgctgcgctggttgtccatgccaaaatgatcccggatgccgatttagcctcattaatgaaacaaatgcccggtatggtgctgatcaaccgtatcctgcctggctttgaaaaccgttgtattgctctggacgatcgttacggtgcctggctggcaacgcgtcatttaattcagcaaggtcatacccgcattggttatctgtgctctaaccactctatttctgacgccgaagatcgtctgcaagggtattacgatgcccttgctgaaagtggtattccggccaatgaccggctggtgacatttggcgaaccagacgaaagcggcggcgaacaggcaatgaccgagcttttgggacgaggcagaaatttcactgcggtagcctgttataacgattcaatggcggcgggcgcgatgggcgtgctcaatgataatggtattgatgtaccgggtgagatttcgttaattggctttgatgatgtgctggtgtcacgctatgtgcgtccgcgcctgaccaccgtgcgttacccaatcgtgacgatggcgacgcaggctgccgaactggctttggcgctggcggataatcgccctctcccggaaatcactaatgtctttagtccgacgctggtacgtcgccattcagtgtcaactccgtcgctggaggcaagtcatcatgcaaccagcgactaaccgcagttaaagcaattccagcgccagtaattcttcaatggtctggcgacggcgaatcaaccgcgcctgaccattatcaaacagaacttctggtaacagcggacggctgttgtagttggatgacattgatgcgccatatgcccctgtatcatgcagtaccagataatcacccgccttcacttccggcaaggcgcgggtttcgacatttcccccttcctgctgggtaaagacatcgcccgattcacataacggcccggcgacgacggtttccaccgttggcgcgtgttccagagaacgaccctcagctgccagggcactgatatggtggtaactaccgtacattgccgggcgcatcagatcgttgaacccggcatcaaccagcacaaagtggcggctacccatttgtttgacgctccgcacttgagtaattaatacgccagcctgcgctaccagaaagcgacccggttcaatttccagtttcacaggatggcccaaatggcgggcgatttgctcacgcgcggcattccacagaccataataatgttcggtatcaaccgcctcttcaccctgttgataaggaatagaaagcccaccgcccgcagaaatagcctgtaaatcctgaccgaactcgaggacctgacgcaccatagcaccacatacctgttccagatgggcataatcgacgccagaaccaatgtgcatgtgaatgccgaccagctgtagatgatgacgttgtatcacgtccagtgcggcgggcagatcggtgtaccagataccgtgcttgctgttttcgccaccggtattggttttttggctatgcccgtgaccaaaccccggattaacacgcagccatacccgatgccctggagaaacctgacccagttggtcgagcatatcaacagaacccgcattcaccggaatttgcaattcactgacgcgttcaagcgtcgcctgatcgataacatctgccgtaaaaacaatatcatcggggtgcgtttgcggattgtaacccgccgccagtgcacgctctatttcgcctaacgagacggaatccacttttacgccctgctcacgcattaagcgcaaaatatgaatattggaacaggctttctgtgcaaagcgcaccacatcaaactgtttcagcgctgcaatctgccgacgaataatttgcgcatcgtagacccacaccgggcagccaaattctgcgggcaaacgcagcagattttcggcggtgagatcggtatcagtgctgaacagtgaatgtggcataacaaactccagataagtgcttttttatgattacgccacatcataaaaagaataaaaaatatcgatttatgtcgagtctatgcaaaaatgatatggattaccggattgcgagagagcgctaatggccgcagttaacttacgtcatattgaaatttttcatgcggtaatgaccgccggaagcctgactgaggcggcacacctgctacacacctcacagccaaccgtcagccgcgaactggcgcgctttgagaaggtgatcgggctgaaattgtttgagcgcatacgtggacgattacatcctaccgtgcaaggactgcgtctgtttgaagaagtgcaacgatcctggtacggactggatcgcattgtcagtgccgcagaaagtctgcgcgagtttcgccagggagaactgtctattgcctgcctgccggtcttttcgcaatcttttttaccgcagctcctgcaaccctttctggcacgttatcccgatgtcagcttaaatatcgtgccccaggaatcaccgctacttgaagagtggctctcggcccagcgtcatgatttaggactcactgaaacgctccatacgcctgcgggaacagaacgtaccgaattactctctttagatgaagtgtgtgtgttacctccgggccatccgctggcggtaaaaaaggtattaacgccggatgattttcacagtgagaactacatcagcctttcccgtactgacagctatcgccagttgctggatcaattgtttactgagaatcaggttaaacgacgcatgatcgtagaaacccacagcgccgcgtcagtctgcgcaatggtacgggcgggggtaggcgtttcggtggttaacccgctcaccgcactggattatgcggcaagcggtttagtggtgcggcggttcagcattgcggttccattcaccgtcagcctgatccgccccctgcaccgcccgtcatcagcgctggtgcaggcgtttagtgagcatttacaagcgggattaccgaaactggtcacttctcttgacgctattttgtcgtcagctacgacagcataaaagcgacagcatcctcggcatggatcgccgcggtatcaaacacaggcagaacactgcgctcttctggcaccagtaaaccaatttctgtgcagccaaaaatgacgccctgtgcgccctgttctgcaaggcgagcaatcacttgcgcataataagcgcgtgacgcttcggtaaattgccccagacacagttcttcaaaaataatctgattaattttcgcccgttcatccgcttcaggaataagacagttgatggaaaattgttccgtcagccgcccgcgataaaaatcctgttccatggtgtaacgtgtacccagcagcgccacacgagtcattcctgccccggtaattgcacgtccagtggcatccgctatgtgtaagaaaggcagagagcaacgagactcaatggcatccgccactttatgcatcgtattggtgcataacacaataccttctgcgcccgcccgctgtaagccaagcgccgcctcagccagaatatccccggttttgtcccactcaccgcgacgctggcactcttctatttcatgaaaatcgacgctatgtagcagcacttgcgcagagtgaagcccaccaagccgctgtttaatgccttcatttatcagacgatagtaaggaatagtggattcccagctcattcctcccagcaaaccaattgttttcattcctctctcctgatgtgtgttaccgcaacaaggctgaataaggaacgagacaaacgcctcaacggccaggtgcccaatctctattaacgaaaaaagggccggatgtacagcacatccggcccgtgaaatcagacgccgatatttctcaacttttcgcctgccatcagtttgcgctcgatatgttccagcgtgacatttttggtttccggaatgagccagaaagtgatgcccacaaacgcaatgttcagcgcagtgtagagccagaacgtaccggcagcgccaatgctatcaagcagtgtcaggaaggtcgcgccgataatcatattcgacacccagtttgtcgtcgttgagcaggtgatgccaaaatcgcggcatttcagcggctgaatttcagagcacaagatccacaccactggcgcggcgctcatcgcataaccggcaatacacatcatcgtcatgccaacagagagccaggacaagccactggaagccgtaccgttatcaaactgcatcaggcagtaacccagcaccagagtgcctaacgccatcacgctgaaaccaattttcagagccggcttacgccctgctttatctaccgtaaagaccgcaatgaaggtagcgaacataaaggtcagccccacgaccagagtcgcaatcatctgttgttctgtggtcgtaaagcccgccattttgaagatacgtggcgcgtagtacatgatgatgttcataccggtaaactgctgcatcgcctgcaacaacataccgagaaatacagcacgacggacgttacggttgatcttaaacagtgcccaaccgccctgttttaacttcaggctttcacgaatttcgttgagttcttctcgcgctttttccgacgtatcgcgcagcatacgcaacacttcttccgcctcaatatgacgccccttttccgccagccagcgcgggctatttggcaggaagaccaccagaataatcagcaggactgctggtaaagcaagaacccccaacattgcgcgccagttaccgctataactgaacgctgtatcggataaaaacgccagcacgatgccgagtgtgaccatcaactggtacatgctgatcatcttaccgcgaacgttttcacttgccatttcagaaagatatagaggagcggtgtaagacgcgatcccaacagcaatgcccaacaccacacgagcggcgattaacatctctacgctggtcgcaaaagcggaccctatcgaaccgagtacaaacaggatggcccccgccatcaggctgtatttacgccccaggcggaacgacagccacccattaaacagcgcaccaattgctgcgccgagcatcatgctactgaccacccattcctgcaaacggctggtcagcacaaagtgatcggtaatgaacggcaacgctccggcgattacgccgatatcaagaccaaataacaatcctgcgaccgcagcagctaccgaaacaaacatattcatacgccgcgtatcccgcagaggacgtggcgttaaagcagattccgtattgatagtaaccattttttcctgccagcagagagtaagacatagtgaaaaaatacgtgaacaactcacacaggtgtcaggtcggaaatagcataaatatggattaaattgctgcgacatgtcgttatgtgatggatattccaattttcaaattaagttgaattattgagattattattaaccacataattttaaagcagataaaattcataaagttcattaattgataattgatatggattatttcataaccatgatatggattatgatgatctacagatataaaaaaccctgccatgcggcagggtcataaaagtaagaggaatgaattaacgcgccagccaaccgccatccacagcaatggtataaccatttacataatctgaagcgctggaggcaagaaacactaccggccccatcaggtcactcggcagtccccaacggccagccggaatgcggtcgagaatttccgcgctacgttgttcatctgcccgcagttgttgggtattgttggtcgccatgtaacccggagctatcgcattaacattaatgttgtgtttagcccattcgttcgccatcaatcgcgtcacacccatcacgccgctttttgatgcggtataagaaggcacacggatcccgccctggaaggagagcattgacgcgatattgataatcttgccgccattgccttgcgcgataaagtgtttcgccgctgcctgagacatgaagaatacgctcttgatattcaggttcatgacatcgtcccagtctgtttcgctgaactcgagagcgtcttcgcggcgaatcaatccggcgttattcaccaggatatcaatatgaccaaactccgctaccgcgcgatccagcagtccaggaatgccatcaatctttcgcagatcggcggtcaggcttaaaaaacgacgcccctgcgccgtgacctgcttgatggtttcagtcggttcaacgatgttaatgccaacaatgtcacagcccgcttgcgccagccccaacgccatcccctggcccagcccagtatcacaaccagtgacgaccgcaactttaccttcgagagaaaatgcatttaaaatcataacaataccttattcgtttatgcccacaactagcgcaaatctttaacggccacatggtccatatcatcaaaaacctggttttcaccgaccatgccccagataaaggtataagctttggttccgacgccggaatggatcgaccagctcggggagatcaccgcctgctcgttatgcatcacaatgtgacgcgtttcttgcggttgccccatcatgtggaaaacgcaggcgtcatcatccatattgaaatagaaataaacttccatccggcgctcgtgggtgtgacacggcatggtgttccacaagttacctggagccagctccgtcagccccatactcaattggcaggtttccagcacatccgggacaaaatatttgttaatcgtgcgacggttactggtgaggttatcgcctaacgtgactggagatacttcgtccggtgtgacttttttggtgggatacgtcgtatgcgcgggtgcgcaattgtaataaaacttcgccggagtggcggtatcaatactggcaaagacaacttcttttgcacctttaccaacatacagggcgtcgcggtgaccgatttcatagcattgaccatcgacagtaatcgtaccggcaccgccaatattgataacacctaactcgcgacgttcaaggaaatagcttacgccgagttgtttaccaacttccccgccaacggaaaccgttttagttaccggcataatgccgccaacaataatacggtcaatgtggctgtaaaccatggtgtactcatcggcgacaaataccttttcaaccaaaaattcattgcgcagcccctgggtatccagcgtttttgcgtgcgcactgtggatgctctgtcttacgtccacatcaacctccgataatcagtgaagcgtgaaaatagaaaacaataataaaacactgtttcgttttctctatgaggggatgatatgcccatgggatagggttttcaattaaaaataaaacaatgtttcattttcaagttaaggattaaaaaaagtgcagtgtcgatcacgaatatgtcatgagaatggaaaaatcagggagccctgaaaaggtatgtcgactcaccagccatcattattcaacagattaatgacggcagatatttatcggtaaggaggaaatgcagagctactcgtcacgttcaatggtcaatgccacaccctggcccccgccgatacaaagcgttgccagtcctttgcgggcattacgtttcaccatttcatgaacaagagaaaccaggattcggcaaccggaagcgcctatcggatgaccgagtgcgatcgcaccaccattgacattgacccgacgctcatcccattcaagcatcttgccaaccgaaagcgcctgtgcagcaaacgcttcattagcctcgataagatcgacatcagccaactgccagccaacacgctccaggcaacgacgggtcgcatacaccggcgcaattcccatcaatgccggatccacaccaacgctggcaaatgcgcggatgcgggccagcacgggtaaattcaacgctcgtgctttggcttcgctcatcatcattactgcagctgccccatcgtttatggatgatgcattacccgctgtcacagaaccgagactatcaaatgaaggatttaaacgggctaaggcttctgcgctggtgtcagtgcgtggctgttcatcggtatcaacaaccaacgtctgtccgttactttgggttattaccgggacgatctcatctttaaatcgtccggcgtcaatcgccgctcgcgctttttgttgcgagctaagtgcgtaagcatcctgcaactgacggctgatgccatattcgcgagccagattttcggcggtgacaccaatatgataatcattgaaggcatcccacaacccatcatgcacaagactatcaaccaactggctattgccaagctgtgcgccggtgcggctatcagtcagaacatgtggtgcgcggctcatgttttcctggccaccggcgatgacaatatcagcctcgccacactgtatcgcctgagtagccagatgcagtgctttaagcccggaaccacaaacgtcattaatagtgattgcagaaacgctattaggaagaccacctttaatagccgattgtcttgccggattctgccctgcccctgcagtcaacacctgaccaagaatcacttcatccaccgcatatgcaggaacgccggtacgttctattaacgctttgacgaccaggctgccaagttccacggcggaatgacccgctaacgcaccacgaaagcagccgataggtgtccgtaacgccccgacaatcacaacgtctttcatcacaacctcgcaccaattaacagtgcaatagtaaatgattgttaattacagttatcttaattgtttaaaaaaagtgactattatcacaaaggaaatacgcctgagtagtagtcagagacataactggcacgtaaggtttgcaaccactaactcaccaatagagaggtagatagggcgttaatctcccatacttaacctggtttatggtaaattgccctccattttgtttaatttgtagatgatacgttcagataatgtctaatatttggtcaaaagaagaaactctgtggagtttcgcgctctacggcacagccgttggtgcaggcacgctcttccttcctattcagttaggttcggcgggggctgtggtcctgtttattactgctctggtcgcctggcctttaacatattggccacataaagccttatgccagttcatcctctcatcgaaaacatcagcaggtgaagggataacgggcgcggtaacacactactatggcaagaagattggtaatctgattaccacgctgtacttcatcgccttttttgtcgtcgtgttgatatatgcagtggcaattaccaactcacttacggaacagctggcaaagcatatggttattgatcttcgcatccgtatgttggtgagtctgggggttgtattaatcctgaatctcatttttctgatgggacgccatgcaaccattcgggtaatgggatttttggtattcccattgattgcctatttcttatttctttctatttacctggtcggtagttggcaacctgatctattaacaacccaggtagagttcaatcagaatacccttcaccagatatggatatcgattcccgtgatggttttcgcttttagccatacgcccattatttctacgtttgccatagacagacgtgaaaaatatggcgaacatgctatggataaatgcaaaaaaattatgaaagtcgcttatctcatcatctgcataagtgtattgttctttgtctttagctgcctgctttctattccaccttcgtatattgaagcggctaaagaagaaggggttaccattttatcggcgctttctatgctgccgaacgccccagcatggttgtcaatttccgggattattgtcgcagtagttgcgatgtcgaaatcattcctgggtacgtactttggcgttattgaaggtgccacagaggtcgtcaaaacaacattacagcaggttggtgtaaagaaaagtcgtgcatttaaccgcgcactatcaattatgttggtatcgctgattaccttcattgtttgttgcattaacccgaacgcgatttcgatgatttacgcgatcagcggcccgctcattgccatgatacttttcatcatgcctacgctgtcaacgtatctcatcccggcgcttaaaccctggcgttccatcggaaatctgattaccctgatcgtgggtatcctgtgcgtatcggtaatgttctttagctaatatccgttgtggatggttcaaaattgcttcaattttgaaccatcccagttttcataatgttcatttgttattattccgctctatcacttctctcgtaatattatataattatcagccagttaaacacacaaagagttctgaacatcttaaataagactatttaagatacatgacgattgcattgcgtaaacgctttttatttacaaaaaaatggggaagtattacggcgattgcgaaaagtctgaagcgcttgaattaagataatatagaaaatcagatacaacaaaaatggcaggcagatgatgtgaagataaattggagcgggcgaagggaatcgaaccctcgtatagagcttgggaagctctcgttctaccattgaactacgcccgcttcgagatgcgtaaggcattataaaccttacgctctccttagcaagtatcacgctgctgactgctgattaattcgccatcagcattttggcttgctgccctgaggcggcaagtaacgtagcggatcaattgccgttgcacggtaacgaatctggaaatgcaagcgaacagatgccgcatcagtgctccccatggtagcgattttttgcccagccttcacgctttgcccattatttaccagcatcgtgtcattatgagcgtaagccgtaatgtaatcttcactgtgtttaatcatgatgagattaccgtagccacgcagctggttgcccacatacaccacctttcctgcacccgcggcgtaaataggtgtaccccgtggagctgagatatcaatccctttattgccgccatctgctgtcgaatacggcatgataactttccctgtcgttggccataaccaacaacgttgccctactggcggccaggaagatttcggtaccgctgatgacggtgtaaccgatgcggttttggtcgttgatttggcggttgatttacgtgtactactgctacttttcgccccacccagttttagtttctgacctacttcaatggtgtaagggggggaaatgccgttcagtcgcgccagttcttttacgctggttcccgtggtgcgcgaaatacgatatagcgtatccccccgtttcacggtgtaaacggagccggaatacgttcctgtatcggatgatttgctacccgaacagcccgccaaaagcagtccaaccgataacaacatcacgatacccagagattttttattcaggcgtcccgcactcaaaatctttcctcgcttaaaaaacaagacgccatatcatagcagccagcctcttgatacccaatctcttgcttctggaaaaacgatgtaatagagaaagaggttaatttcatttggcaaagggaagtatcatcagcaaaatatttgctgtagtggtatcgaagttcctgacttttaccctatttcccaccttgatgcgtaataatcctaatttatcacattgattttatcgccactcatattgatacgtatcactgtccctattcagagtcctgtttcgtatcatatctgtgtttttttaacgtcatcacacttccttcctcccctcacgcatatagtcgtttctggcgtaattcttgcctgctaagactaaatctttgccataagaaccaaatgttcaaaccgaggggatttctatggaagcgcgggaagcaaccgctacgggtgaatcatgcatgcgcgtcgatgccattgctaaggtcaccgggcgggcacgatatactgacgattatattatggcgggcatgtgttacgcgaaatatgtacgtagccctatcgcacatggttatgctgtaaatattaatgatgaacaagccaggagtttgccgggcgtcctggcgatttttacctgggaagatgtgccagaaatcccattcgccacggcagggcatgcctggacacttgacgaaaacaagcgcgataccgccgatcgtgccctgctaacgcgtcatgttcgtcatcatggtgacgccgttgccatcgtcgtggcccgcgatgaactcacggcagaaaaagcggcgcaattggtcagcattgagtggcaagaattacccgttatcacctcgccagaagcggcgctggcagaagacgctgcaccaatccataacggtggcaatttactgaaacaaagcacgatgtcgacgggtaatgtccaacaaacaatcgatgccgccgactaccaggtacaggggcactatcagactcccgttattcaacattgtcatatggaaagcgtgacatcgctggcatggatggaggatgactcgcgaattaccatcgtttccagcacccagatcccgcacattgttcgccgcgtggttggtcaggcgctggatattccctggtcatgcgtacgagtcatcaaaccgtttatcggtggcggttttggtaataaacaggatgtactggaagagccaatggcggcattcctgaccagcaaacttggcggcattccggtgaaagtttcccttagccgtgaagagtgtttcctcgcaacccgtacccgccacgcttttactattgacgggcaaatgggcgtgaaccgcgacggaacattgaaaggttatagtctggatgttctgtctaacaccggcgcttatgcatctcacgggcactccattgcttctgctggggggaataaagtcgcttacctttatcctcgttgtgcctacgcttacagttcaaagacctgctataccaacctcccctcggctggtgcgatgcgtggttatggcgcgccacaagtcgtatttgccgttgagtctatgcttgatgatgccgcgacagcgttaggtattgatcctgttgaaattcgtttacgcaacgccgcccgcgaaggagatgctaatccgctcacgggaaaacgtatttacagcgcagggttgccggagtgtcttgaaaaaggccggaaaatctttgaatgggaaaaacgccgtgcagagtgccagaaccagcaaggcaatttacgtcgtggcgttggcgtcgcctgttttagctacacctctaacacctggcctgtcggcgtagaaatagcaggcgcgcgcctgttgatgaatcaggatggaaccatcaacgtgcaaagcggcgcgacggaaatcggccagggtgccgacaccgtgttctcgcaaatggtggcagaaaccgtgggagttccggtcagcgatgttcacgttatttcaacccaagataccgacgttacaccattcgaccccggcgcatttgcctcacgtcagagctatgttgccgcgcctgcgctgcgcagtgcagcactgttattaaaagagaaaatcatcgctcacgccgcagtcatgctacatcagtcagcgatgaatctgaccctgataaaaggccatatcgtgctgattgaaagaccggaagaaccgttaatgtcgttaaaagatttggcgatggacgctttctaccaccctgaacgcggcgggcagctctctgccgaaagctccatcaaaaccaccactaacccaccggcgtttggctgtacctttgttgatctgacggtcgatattgcactgtgcaaagtcaccatcaaccgcatcctcaacgttcatgattcgggccatattcttaatccgctgctggcagaaggtcaggtacacggcggaatgggaatgggcattggctgggcgctatttgaagagatgatcatcgatgcgaaaagcggcgtggtccgtaaccccaatctgctggattacaaaatgccgaccatgccggatctgccacaactggaaagcgcgttcgtcgaaatcaatgagccgcaatcagcatacggacataagtcactgggtgagccccccataattcctgtagccgctgctattcgtaacgcggtgaagatggctaccggtgttgcaatcaatacactgccgctaacgccaaaacgattatatgaagaattccatctggcaggattgatttgaggataacatcatgtttgattttgcttcttaccatcgcgcaaccacccttgccgatgccatcaccctgctggctgacaatccgcaggccaaattgcttgccggtggcactgacgtactgatacagcttcaccatcacaatgaccgctatcgccatattgttgatatccacaatctggcagagcttcagggaataacacaggcggaagatggcgcgctgcgaatcggctctgcgacaacatttactcagctcattgaagatcccgtaatccaacgcaatctcccggcgttatgtgctgcggctgcatcaatcgccgggccgcagatccgtaatgtcgccacctacggcggaaatatttgcaacggtgccaccagcgcagattctgccacgccaacgctaatttatgacgcgaaactggagctccactccccacgcggtgttcgtttcgtcccgattaatggctttcacaccgggccgggcaaagtgtctcttgagcatgacgaaatccttgtcgcctttcattttccgccacagccgaaagaacacgcgggcagcgcgcattttaaatatgccatgcgcgacgcaatggatatttcaacaattggctgcgccgcacattgccgactggataacggcaatttcagcgaattacgcctggcatttggtgttgccgcgccaacgccgattcgctgccaacatgccgaacagactgcacaaaatgcgccattaaacctgcaaacgctggaagccatcagcgaatcagtcctgcaagatgtcgccccgcgttcttcatggcgggccagtaaagagtttcgtctgcatctcatccagacgatgaccaaaaaagtgattagcgaagccgtcgccgcggcggggggaaaattgcaatgaatcacagcgaaacaattaccatcgaatgcaccattaacgggatgccttttcagcttcacgccgcgccaggaatgccgctttcggaactactccgagaacaagggcttcttagtgtcaaacaaggttgctgcgtaggcgaatgcggtgcctgtacggtgctggtcgacggcactgcgatagacagttgcttattccttgcgacctgggctgaaggaaaagagatccgcacgctggaaggtgaagcgaaaggcggtaaactttctcatgtccaactggcttatgcgaaatctggtgcagtgcaatgcgggttttgtacgccgggcctgattatggctaccacggcgatgctggcaaaaccacgcgaaaaaccattaaccattacggaaattcgtcgtggactggcgggaaatctttgtcgctgcacggggtatcagatgattgtaaatacagttctggattgcgagaaaacgaagtaaaaggatatccggcctgaattcaggccggattctcagaggttatgtgtttaacaactcatatttcttaatcttgcgatagagcgtagcaatgccgatgcccagttcatcagcaacttccttcttgctgttatgacgtgaaagcgcctcgcggatcatttgcttttccatctcctccagcgccgtgccgcccgcatcatcgagtgacaggtgcgcctcactgacctctgttacatcactttgctccgttgtgccattattcagcagatttggcggcaatagcgtgctgtcgataacttcacctgaaggaacaacgttaaccagatattccatcaaattgcttaactcgcgcaggtttccgggccaacgatgcttacgcaatatttcgacgacatcaggagcaatgccaagataaaccgatcccagacgacgggtatgcagatgtaaaaagtaatgcaccagtaattcaatatcttcctgacgttcacgcagcggtggaagagttatcgggataacattaagtcggtagaagagatcttcgcggaatttaccttcggcaatgaactgggccaaattctgattagttgcagaaatgatgcggatgtcgacttgtattgggctactggcaccaatcggcagaatttcacgcgcctcaatagcgcgcagtaatttagcctgcaacattaatggcatatcaccaatttcatcgagaaacagcgtgcccgtattcgccgcctgaatcaaccctgttttaccgttggcagaagcgccagtaaatgcgcctttaacataaccgaacagttcgctctccagaagctgttccggaatcgcggcacagttgatagcaataaagggtttattccgtcttccgctcaacttatggattgcacgggcgacgacttctttacccgtgccgctttcaccaaccaccataacgctggatgggctgggtgcaatacggctaatgagtcgttttaattgccgcataacacggcactcgccaaccaattgttcaatatgcggttcatcagatgcatttgctacagaaaaactggtatgcgattggtgaaacgccattaaaaatagttgtcggccctggatgttatgcaactgaccaatgattaattcacttttatcatcccacgaaacaatatgttgcatatgaccatgggtaaaattactctcaaatgttaatggtctgaaacgaacaggttttccaataatattattttgtacaacaccgagtgtttttaaagctgtctgattaacaaactgaacccgattatcagcatcaaccactaacacgccctgatccatattatcgatcatggtcgcgaatattttactgatgttatctcctggtccctgatcctccagaagtttagaaacaaaaatggtggatatatggcgaacgtaatcggaaaattcgcgtaaattatcactgatatgttcttgttgctcgtgggtaacggcaatcaaacttatcaccccaacacaacgttcctgtaaaatgacaggcgtacccagaaatgctttttcgcggcaattttctttactatcgcaaccttcacaaaggggatcgaagcgagactgtgtcacaactttttcagttttcgtttccaggacgtggcggagcaggcgtgagttgccgctcaactggcggccaagaaacttcccatacgcgcccgttccggcgacgcgacacaagttttcatcaacgatctcaacctcaagctgcaaaacgctggcaagcattctggcaaaacgctgaattgtcggttgaatttgcatcaatactgactgcgtagtcgcaagctccatagctttaccttccagacttacttaaaagtcgatcattgaagacgttgatggttcacagatcatgatgatattaactcaggcgaaattggctttgataaaaacataagatttttatcactttctaataaaattatggaagagatatcacatttctatatcaatatgagaattacagcggcaagtttatcaaactgaagagagatagcctgcctctttatcttatttctgatacttagcagcaaataaataacgtgataaaaaaagccaaacgttttcgtattttaaaaacaaccggaaactggcatcaatatgtgatcaaccccacacattatccgtcaaattagcctttcgcagccgcgtggataattctggcacacttattgttagtcccaggtatagctgtgaaaacaccaatcactttggcacgtcacagtgaaataaaccactttgcctgtcattccactatcgggactttatgatgaaaactgttaatgagctgattaaggatatcaattcgctgacctctcacctgcatgaaaaagattttttgttaacgtgggaacagacgccagacgaactgaaacaagtactggacgttgccgccgcgttaaaagcactgcgtgctgaaaacatctcaaccaaagtctttaatagtggattaggtatttccgtcttccgcgacaactccacccgtacccgcttctcttatgcttccgcgcttaacctgctcggccttgcacaacaagatcttgacgaaggtaaatcacaaatcgctcacggcgaaaccgtgcgtgaaaccgccaatatgatctccttctgcgctgacgctatcggtattcgcgacgatatgtatctgggcgcaggcaacgcctatatgcgtgaagttggcgctgcacttgatgacggttacaagcagggtgtgctgccgcagcgtccggctttagtgaacctgcaatgcgatattgaccacccgactcaatcaatggctgatctggcatggttacgtgaacactttggttcgctggaaaacctgaaaggcaaaaaaatcgccatgacctgggcctactctccaagctatggcaaaccgctctctgtaccacaaggcatcataggtctgatgacccgcttcggtatggatgtcaccctggcccatccggaaggatacgacctgatcccggatgtcgttgaggttgctaaaaacaatgctaaagcctccggtggtagcttccgtcaggtcaccagcatggaagaagccttcaaagacgcagacatcgtttatccgaagtcatgggcaccttacaaagtgatggaagagcgtactgaattgctgcgtgcgaacgatcacgaaggcttaaaagcactggaaaaacagtgtctggcacagaacgcgcaacacaaagactggcattgtactgaagagatgatggaactgacccgtgatggcgaagccctgtacatgcactgcctgccagctgatatcagcggcgtatcctgcaaagaaggtgaagtgactgaaggcgtattcgaaaaataccgtatcgctacctacaaagaagccagctggaagccttatatcatcgccgcgatgatcctgtcccgtaaatacgccaaaccaggtgcactgctcgagcaactgctgaaagaagcgcaagaacgcgtgaaataacccctcgggccgatcagctggtcggccctctatttccagaggccaaaaggataggatatgtccgttttctcattgaagattgatatcgccgataacaaatttttcaacggcgaaacatcaccgcttttttcgcaaagccaggcaaaactggcacgccagttccaccagaaaattgctggttatcgcccaacaccgctttgtgcgctggacgatctcgcaaacctgtttggtgtaaagaaaattctcgtcaaagacgaatcaaaacgattcggtctgaacgccttcaaaatgctcggcggtgcgtacgccatcgctcaattattgtgtgaaaaatatcatcttgatatcgaaacgctgtcatttgagcacctgaaaaatgccatcggcgaaaaaatgactttcgcgactaccaccgacggcaaccacgggcgcggtgtggcatgggcagcacagcaactcggacagaatgcggtgatttacatgccgaaaggttctgctcaggaacgcgttgacgccattctaaacctcggtgccgagtgcatcgtcacggatatgaactatgacgataccgttcgcctgaccatgcaacacgcgcagcagcacggctgggaagtggtacaggacacggcatgggaaggctacaccaaaatcccaacctggatcatgcaaggctacgcaacactggcggatgaagccgtcgagcaaatgcgtgaaatgggcgtcaccccgacacacgttctgctacaagccggtgtcggtgcaatggccggtggtgtgctgggttatctggtcgacgtctatagcccgcaaaatctgcacagcattattgttgaacctgacaaagctgactgtatttatcgctccggcgtcaaaggcgacatcgtcaacgttggcggtgatatggccaccatcatggcgggcctggcctgcggcgaacctaacccactgggctgggaaatcctacgtaactgcgccacccaattcatctcctgccaggacagcgttgccgcattaggtatgcgcgtgctgggtaatccgtatggcaacgacccgcgcatcatctccggtgaatccggcgctgtcggtttgggcgttctcgcagcggttcattatcacccgcaacgtcaaagcctgatggaaaaactggcgctgaacaaagatgccgtggtgctggttatcagcactgaaggcgacaccgacgtgaagcactaccgcgaagttgtctgggaaggcaaacacgctgtagcaccttaatcaccctattggaactgctccctgcaaaacggggagtaaaaaatctggagaaaaataatggctaagaatattccattcaaactgattcttgaaaaagcaaaagattaccaggcagacatgactcgcttcctgcgcgatatggttgctattcccagtgaaagctgcgacgagaaacgcgtagtacatcgtattaaagaagagatggaaaaagtcggcttcgataaagttgaaatcgacccaatgggcaacgttctcggttatatcggccacggcccgcgtctggtggcaatggacgctcatatcgatacagtcggcattggcaacatcaaaaactgggacttcgatccgtatgaaggcatggaaaccgacgagctgatcggtggtcgtggtacttccgaccaggaaggcggcatggcgtctatggtatatgccggaaaaatcattaaagatctcggtctggaagatgaatataccctgctggtcaccggtactgtgcaggaagaagactgcgacggtctgtgctggcaatacattattgaacaatccggcattcgcccggaatttgtggtcagtaccgaaccaaccgactgccaggtataccgtggtcaacgcggtcgtatggaaattcgcattgatgttcagggtgttagctgccacggttcggcaccagaacgtggtgataacgccattttcaaaatgggtccaattcttggcgaattacaggaactgtctcaacgtctgggctatgacgaattcctcggcaaaggtacgctgactgtttctgaaatcttcttcacctccccaagtcgttgcgctgtagcagacagctgcgcagtttcaatcgaccgtcgtctgacctggggcgaaacctgggaaggcgcgctggacgagatccgcgctctacctgcagtacagaaagctaacgcggttgtttctatgtacaactacgaccgcccgtcctggactggcctggtttacccaaccgaatgctacttcccgacctggaaagtggaagaagatcacttcaccgttaaagcactggtgaatgcttatgaagggctgtttggtaaagcgcctgtcgttgataagtggaccttctcaactaacggcgtatccatcatgggtcgccacggcattccggtcatcggttttggccctggtaaagaacctgaagcgcacgcgccaaacgaaaaaacctggaaatctcacctggtaacttgtgccgctatgtacgctgcaatcccattaagctggctggcaaccgaataattactcttcacttattccccctccggtttaccggagggtttttggagtttgctatgcgcgtattgataaaaaacggcattgttgttaatgcagatggacaggcgaagcaggatttgctgattgaaagcgggattgttcgccagttgggtaccgatatttcgccgcaactcccttgcgaagaaattgatgcctctggctgttacgttttccctggcggcgtggatgtccatacgcatttcaatattgatgtcggcatcgcgcgcagttgtgatgatttttttaccggtacccgcgctgctgcgtgtggcggtacaacaaccattattgaccatatgggatttggcccaaatggctgccggttacgccatcaactggaagtttatcgcggttatgccgcccacaaagcagtcatcgactacagctttcacggtgtcattcaacatattaatcacgctatcctcgacgaaattccgatgatggttgaggaaggactgagcagttttaaactctatttaacctatcaatataaactcaacgatgatgaagtgttgcaggcattacgccgcttgcatgagtccggcgcgctgaccaccgtacacccggaaaatgacgcagctatcgccagcaagcgggcggagtttatcgccgcagggttaaccgcgccgcgttatcatgccttgagtcgacctctggaatgcgaagcggaagccatcgcccgcatgattaacctggcacaaattgccggtaacgccccgctctatatcgtgcacctgtctaacggcttaggtctggattatctgcgtcttgcccgtgcgaatcaccagccagtctgggttgaaacctgcccacaatatctcctgttggacgaacgcagttacgatacagaagatggcatgaagttcattcttagcccaccgctgcgtaacgtacgcgagcaggacaaactgtggtgtggcatcagcgatggtgcgattgacgtggtggcaaccgatcactgcaccttctcgatggctcaacgcctgcaaatttctaaaggcgatttcagccgctgcccaaatggcttacccggtgtggagaaccgcatgcaactgctgttctccagtggcgtgatgacgggacgtatctcaccggagcgttttgttgagttaaccagtgcaatgcccgccaggttgtttggcctgtggccgcaaaaaggattattagcgcccggttccgatggcgacgtggtgattatagacccacgtcagagccaacaaattcagcatcgccatctccacgacaacgctgactactcgccatgggaggggtttacctgtcagggcgcgattgtcagaaccttatcccgtggtgaaacgattttctgcgacggcacctttacaggcaaagccgggcgaggtcgtttcctgcgacgcaaaccgtttgtccctcccgtgctctaaccactgccagggatctatacacaatcaagaatgatgagtgaggaaaaatgagtaagaaaattgttctcgccctgggcgggaatgcgctgggcgatgacctggctgggcaaatgaaagcggtaaaaattacttctcaggcaattgttgatttaattgcccagggacatgaggtcatcgtcactcatggcaacgggccacaggtgggcatgattaaccaggcctttgaagctgcagcaaaaactgaagcgcactcgccaatgctgccgatgtctgtctgtgttgccttaagccagggttatattggttacgatctacaaaacgccttaagagaagaactgctttctcgtggcattaataaacctgtagcaacgctggttacccaggtcgaagtcgatgctaacgatccggcattcctcaacccgaccaagccgatcggttcgttctttaccgagcaagaagcagagctactgacaaaacagggttacactctgaaagaagatgcgggtcgcggctatcgtcgtgtcgttgcttcgccaaaaccggttgatatcattgaaaaagaaacggttaaagctctggtagatgccggacaggtggtgatcaccgttggcggtggtggtatccctgttattcgtgaaggtaaccatctgcgtggtgccagcgcggttatcgataaagactgggccagcgcccgtttagcagaaatgatcgatgccgatatgctgatcattctgactgcggtagaaaaagtggccattaacttcggaaaagagaatgaacagtggctcgatcgcctgtcgttaagtgatgctgaacgctttatcgaagaaggtcattttgcgaaaggttctatgctgcctaaagtggaagctgccgcctcgtttgctcgctctcgcgcaggtcgtgaagcactgattaccgtattgagcaaagcgaaagaagggattgaaggcaaaaccggaacggtgatttgtcagtaatttaaaggccggatgggtaataccatccggccattttcatttaagccacttccagcacttcttttgtcgctttaacgccctgatgcatcaacatcattaacgcctcaagtacgccgccgccaatcgcccgggctttatcagaaacgctggtgaaatcagccgtttcaccacgaggatcgatatcaccaattttaaaaccaccgaccacggccagtccgtcgttcaacaagccacgcaccatccccgtcaacggtgctttaatttcatgctcaccaatccaggcaatgacatcgccctctttcaccagatcgcctaatttcacgttggatcgcataatgcctgcaacaggagcacggatcactcgtcgggtggtatgccccataatattgccgggaacaccggtattctcctgcgcacaacctgagtaaatcacctgaccgagccagtgcccgcgatttgtttcaattaccgcatgacaatccttccctgcagtaaagcccggcccaagcgcgattgttactggtgccatatctgcccgcgttcccaaattctgtttcgccagaatagcgtccaccacgcaaagcggtttcagttcatcaagcaatgaacaggtgggatctaccatcacagggataaatccgcgttcggtaagtttcatcgcttccgcagagctggttgccaggcgggcggtgacgccttcgaccgtcatttcgccatcgaacacggcctgggcaaacgccacggtacaacgaatcactgtcggtttttccacttccaacatgatcactttaaaacccgcatgatacagacgtagcgctacaccactggcgatatcccccgcaccgcgaatcaccaccagctggtgtccggaaggatgagaaggcttcatcatcaacccacccggcgcgttatttttcacctgtaatatttctgccagcacgctaatggcgatctcctgcggcgtttccgcacctatgttgtaaccaacgggcgcatgtaaacgggcaatatgttcttcagccacgcctttctcacgcaattggcgcaggaaaagctgaaccttgcggcgacttgccagcaaccccagccatgcaatgggttgttcaatgagtttgtcgagggcttcacgatcctgattattcgtggcaatcaggacaaaattatcagggcgaatatccagtgcttccactgccgcaccaaacgactcagcatggagaagcgtggttgatggtgggaatagttcaggattgaggctttcgcgataaatatcagcaacggcgatatcaaatcctaatagcgccgcactctgggctatcgcccggttgacatgccccgcaccaatcaacaccagacgtggacgcataccatggacgctgataaatactgacattgcacctccacaatctgacccgacagcatccgcaccgttacgagccatacgtccatggaataatcgcggcttacgttcctgcaatgcctgaagcgactcttcaatcaccttccgttcaaccattccgccaccaattgtaccgacgatagaaccatcggcgcgcactaacatttgtgcagaatggcggggggttgagcctcggctatcaacaatttgcgccatcgcaaacggacaattttgctcttcgagttttgcagcctctgtgaaaatattcataccaacctcaatggatatcctttcagtaacccggaatacccgggccgctaattcacaaatctgcgcgcgattgcaggatgttcttgtatatcgcccagccagattgcctctacgttgtgttgttgcagcggttgaaggagctcgctttgcgcaatcgcattctcacattgagaaaaacggttaatgaaccagactcgccgacaaccttgcggtacgtttttaaacgccccctgagggtggcgaaccagcgcaacgagatcgctcagttgcaagggtgcatcaggtgttaacccagtaatatcagcaaactgcgaccagcgatggacattttctgtgctcactttcgcacccaaaatatgtcctcccatcacagcaatcacgcagcaactgcttttaggtatgcaaggttcgtgctcatcaggcgcttttaacggcattccacgcgagccatctgcctcaatgagaattacgtcacactctggtcgttgtaccagtgcatcaatcgcttctggcgtaaatccctgcacttttccctggttcgctttccagcagtgaaaacaaaatgaaatgggggatataaaagacgcatgaggaagcatggcgggatcacgacagaaaaccacgggccagtgagatgttggcataaacatatgtgtcgtcgtagtgattaatacacgcctgccactcgcctggaacagttctgccagccaaaaaagcaagctggttttccccccagcaccaacaatagaaatcacagtgggacgtttctgcgcgcctaaatcaatgaataatgccgatgggtcaattatacttttcacgcgtctttatggacctctctgggataaattaccctcaacgtaatccatcaggaagtaacgcaattatcaggcgttattagctcctgtaaataatggaatcactatgtcagccatcgactgtataattaccgccgcaggattatcatcaagaatggggcaatggaaaatgatgttaccctggcaacagggaacaattcttgatacaagtatcaaaaatgcgttgcagttttgtagccgaattattttagtcaccggctatcgtggtaatgaactgcacgaacgttatgcgaaccagagcaatatcactattatccacaacccagattatgcgcagggtttactgacatcagtaaaggccgcagtacccgcggtgcaaacagaacattgttttctcacccacggagatatgccaaccctcaccatcgatatttttagaaaaatctggtcgttacgaaatgatggcgcaatactgccactccataatggcatccccggccatccgattttagtgtcaaaaccatgcctgatgcaggcaatccagcgacccaatgtcaccaatatgcgtcaggcactccttatgggagaacattattccgtcgaaatagaaaatgcagaaataattttagatattgatactccggacgactttattacagcgaagaaaaggtatactgaaatttagaaaacgtagctaaacgattgcgttcaaatatctaatccctccagcactctttatcataatgataaggaatcactgattttgagaaaagagaaaaagtgataaatgggctggcaataataattttcaggagtgattttaattctcatttggcacctgtgagttcattcacaaaaagccattaagtttcgagccgcctcacatttttttatatttcccgccaaacctggcaagagtggtgcgattgttgctctatccccctaaaccaccggatttctcaacaccggtcactcaatgatatctgtataagctaaggagagggttatgggggatattatgcgtcccattccgtttgaggaacttttgacgcgcatatttgatgaataccaacaacaacgctcaatctttggtattcccgagcaacagttttactcacccgtaaaaggtaaaactgttagcgtcttcggtgaaacctgtgccactcccgtcggccctgccgctggcccgcacacgcaacttgcgcaaaacatcgtcacctcctggctgactggcggacgcttcatcgaactaaaaaccgtccaaattcttgaccgcctggagctggaaaagccctgtatcgatgccgaagacgagtgctttaacaccgaatggtctaccgaatttaccctgcttaaagcctgggatgaatacctcaaagcctggtttgccctgcaccttctcgaagcgatgttccagccttctgattccggtaaatcgttcatctttaatatgagcgtcggttacaacctcgaaggtattaagcaaccgccgatgcagcagttcatcgacaatatgatggacgcatctgaccatccgaaattcgctcaataccgcgatgcacttaataagctactccagaatgaggcatttttagcccgccacggattgcaggaaaaacgcgaaagcttgcaagccttacccgctcgcatccccaccagcatggtacaaggggttaccctctccaccatgcacggctgtcctccgcatgaaatcgaagccatttgccgctacatgctggaagaaaaagggctcaacacctttgtgaaactcaacccgaccttactggggtacgcgcgtgttcgtgagatcctcgatgtctgcggtttcggttacatcggcttaaaagaagagtcatttgatcacgacctcaagctgacgcaagcgctggaaatgctggaacgcctgatggcactggcaaaagaaaaatcactcggctttggcgtaaaactgactaacactctcggcaccattaataacaaaggcgcactgcctggtgaagagatgtatatgtcaggccgtgcgctgttcccgctctccatcaacgttgcagcagttctctctcgcgcctttgacggcaaactgcccatttcttattccggtggtgccagtcagctgactatccgcgatatttttgatactggtattcgccctattactatggcaaccgacctgctgaaacctggcggctatctgcgcttaagtgcctgcatgcgcgagctggaaggctccgacgcctggggacttgaccatgttgacgtcgaacgactgaacagactggcagcagacgcgttaaccatggaatacacccagaaacactggaagccagaagagcgtattgaagtggctgaagacctgccgctgaccgattgctacgttgccccctgtgttactgcctgcgctatcaagcaagatattccggaatacatccgtctgcttggcgaacaccgctatgccgacgcgctggaactcatctatcaacgcaacgccctgcccgccattaccggtcatatttgcgatcaccagtgccaatacaactgtacccgcctggattacgacagtgcgctgaatatccgcgaactgaaaaaagtcgcgctggaaaaaggttgggaggaatataagcaacgctggcacaaaccagccggttctggttcacgccatccggttgccgtgattggtgcaggtccggcgggtctggccgcaggttacttccttgccagagcgggccatccggttacgctgtttgaacgcgaagccaatgcgggcggcgtggtgaaaaatatcattcctcagttccgtattcctgcagagttaattcagcacgatatcgattttgttgccgatcacggcgtgaaatttgagtacggttgctcacccgatttgaccgttgaacagttaaaaaatcagggcttccactatgttctgattgccaccggtaccgataaaaatagcggtgtgaaactggcgggcgacaaccaaaatgtctggaaatcactccccttcctgcgtgaatacaacaagggcaccacactcaagctgggcaaacatgtggtcgttgtcggggcgggtaacaccgcaatggactgcgctcgtgcggcgttacgcgttccaggcgtagaaaaagcaacggtcgtttaccgtcgttcactgcaagagatgccagcatggcgcgaagagtatgaagaagcgttgcacgacggcgtggagttccgtttcctgaataatccggaacgtttcgatgctgatggcaccttaaccttgcgcgttatgtcgcttggcgaacctgatgagaaaggtcgtcgtcgtccggttgaaaccaacgaaacagtaacactgcatgtagacagcctgatcaccgccattggtgaacagcaggatactgaagccctgaatgcgatgggcgtgccgctggacaaaaacggctggccagacgtcgaccataatggcgaaacgcgtctgagtgacgtctttatgatcggcgacgtacagcgcggaccatcctccattgtcgctgctgtcggaaccgcgcgtcgggcgaccgatgccatcctgagtcgggaaaatatccgttcccaccagaacgataaatactggaataacgtcaatccggcggaaatctatcaacgtaaaggcgatatctctgtcactctggtgaacagtgacgatcgtgatgcgtttgtcgcgcaggaagccgctcgctgccttgaatgtaactacgtttgcagcaagtgtgtggatgtctgcccgaaccgcgccaacgtatccattacggtcccaggcttccagaaccgtttccagacgctgcacctcgacgcttactgtaacgaatgtggcaactgcgcccaattctgcccgtggaacggtaaaccgtacaaagacaaaatcaccgtcttcagcctgtcgcaagactttgataacagcagcaacccaggcttccttgtggaagattgccgggtacgcgtacgtctgaataaccaaagctgggtgttaaacatcgacagcgaaggtcagttcaacaacgtaccaccggagctgaacgatatgtgccgtatcatcagccatgtccaccagcatcatcattatctgctgggccgcgtggaggtgtaatcatgttgattctgaagaatgtcaccgcagtgcagttacacccggcgaaagtgcaggaaggcgttgatatcgccatcgaaaatgatgtgattgtcgctatcggcgatgccctgacgcaacgctaccccgatgccagctacaaagagatgcatggtcggattgtgatgccgggaattgtctgctcgcataaccatttttactcggggctttcccgcggaattatggcaaacatcgccccctgcccggatttcatctcaacgctgaaaaatctctggtggcggctcgatcgcgcccttgatgaagagtcgctctattacagcggactgatttgttccctggaagcgattaagagcggatgtacatcggttatcgatcaccatgcctctccagcctatatcggcgggtcgctctccacattgcgcgacgcatttttaaaagttggcctgcgcgcgatgacctgttttgaaactactgaccgtaacagcggcatcaaagagttgcaggaaggtgtagaagaaaacatccgcttcgcccgtcagattgatgaggcgaagaaagcagcaaccgagccgtatctggtggaagcacatatcggcgctcacgcgccgtttaccgtaccggatgccggtctggagatgctgcgtgaagccgtgaaaagcacaggtcgtggtttgcatattcacgctgcggaagacctttacgacgtttcctacagtcaccattggtacggcaaagacctgctggcacgactggcgcaattcgatctcatcgacagcaaaacgctggtcgctcatgggctgtacttgtcgaaagatgacatcgccctactcaatcagcgcgatgcgttcctggtgcataacgcccgttcaaacatgaacaaccatgtcggctacaaccatcaccttagcgacatccgcaatctggcgttgggaacggacggcattggttcggacatgtttgaagagatgaaatttgccttctttaaacatcgcgatgcgggtggcccgctgtggcctgacagttttgccaaagcactggctaacggcaacgaactgatgagccgcaactttggcgcgaaatttgggcttctggaagccggttacaaagccgatttaaccatttgcgattacaactcgccaacgccgctgctggcagacaatatcgccgggcatatcgctttcggtatgggctcaggcagcgttcacagcgtgatggtcaatggtgtgatggtctatgaagaccgtcagtttaacttcgattgcgattccatttatgcgcaagccagaaaagccgctgccagtatgtggcgtcggatggatgcgctggcataaataacagctcccctcttctttcagagaagaggggaaattaaggaaagacgatgattgaacaatttttcagacccgactctgtcgaacaagcgctggaactgaagcgccgctaccaggatgaagccgtctggttcgccgggggcagcaaactcaacgctacaccaacccgtaccgataaaaagattgccatttccttgcaggatctggagctggactggattgactgggataacggtgcactacgaattggcgcaatgtctcgcttgcagtcactgcgtgatgcacgatttattcctgcagcactgcgtgaagctctcggttttgtttactcacgccatgttcgtaatcagtcgaccattggtggtgaaatcgccgcccggcaggaagagtcggtgctgcttcccgtcctgctggcactggatgctgaactggtttttggcaacggcgaaacgctgtcaatcgaggactacctggcctgcccatgcgatcgcctgttaaccgaaattatcattaaagatccgtatcgtacctgtgcgacccgcaaaattagccgttctcaggcaggtttaaccgtcgtgacggcagccgttgcaatgacagaccacgacggtatgcgaattgcgctggatggcgtcgccagtaaagcactgcgtctgcacgatgtcgaaaaacaaaatctggaaggcaatgcacttgaacaggctgtcgccaacgccattttcccgcaggaagatttgcggggcagcgtggcctataaacgctatatcacgggagttctggtagccgacctgtatgccgactgccaacaggctggggaggaagccgtatgatcatccactttactttaaatggcgcgcctcaggagctaaccgttaatccaggcgaaaacgtgcaaaagctgttgtttaacatgggaatgcactctgtacgcaacagcgatgatggattcgggtttgccggttctgacgcgattatctttaacggtaatatcgttaacgcgtccttgcttatcgccgcacagttagagaaggcagatattcgtaccgcagaatctctgggcaaatggaatgagttaagtctggttcaacaggccatggttgatgttggcgtggtgcagtctggttataacgatccagctgcggctctgattatcaccgatcttctcgatcgcatcgacgcacctacccgcgaagagatcgacgacgcgctctcaggtctgtttagccgcgatgcaggctggcagcaatactatcaggtcattgaactggcggttgcacgtaaaaataatccgcaggccaccattgatatcgctccgactttccgtgacgaccttgaagtcattggcaagcattatcctaaaactgatgccgcgaaaatggtgcaggcgaaaccctgctatgttgaagatcgcgtaacggctgacgcctgcgtcattaaaatgttacgtagcccacacgctcacgcactgattactcatctggatgtcagcaaagctgaagccttaccgggcgtcgttcacgttattactcacctgaattgcccggatatttactataccccgggtggtcagagcgcaccggaaccatcaccgcttgaccgccgtatgttcggcaagaaaatgcgtcacgtcggcgatcgcgttgctgcggtagtagccgaaagtgaagacattgcgctcgaagcactgaagctcatcgacgttgaatatgaagtgcttaagccggtaatgtcgattgacgaggcaatggcggaagatgcgcctgtcgtgcacgatgaaccggtggtgtatgttgctggtgcgccagatactctggaagatgataacagccatgcagcccagcgcggcgagcatatgatcatcaacttcccgatcggttctcgcccacgcaaaaatatcgctgccagtattcatggtcatattggcgatatggacaaaggctttgccgatgccgatgtgatcattgagcgaacctataactcaacgcaggcgcagcagtgcccgactgaaacacatatctgctttacccgtatggacggcgatcgtctggtgatccacgcctccacccaggtaccatggcacttacgccgccaggtcgcgcgcctcgtgggcatgaaacaacataaagttcatgtcattaaagaacgtgtaggcggcggttttggctctaaacaggacatcctgctggaagaagtgtgcgcttgggcaacttgcgtaaccgggcgtccggtacttttccgctacacccgtgaagaagagtttattgctaacacctctcgtcacgtagcgaaagtcaccgtcaaactgggcgcgaaaaaagatggtcgcctgacggcagtgaagatggatttccgcgccaacacgggtccttacggtaaccactcactcaccgtaccgtgtaacggaccggcgctgtcgctgccgttatatccatgcgataacgtcgatttccaggtcaccacctactacagcaacatttgcccaaatggtgcttatcagggttatggcgcaccgaaaggtaacttcgctatcaccatggcgttagcggaactggctgaacagttacagatcgaccaactggaaattatcgaacgtaaccgggtacacgaagggcaagagctgaaaattctcggtgcaatcggtgaaggtaaagcgccgacctccgttccttccgccgccagctgcgcactggaagagatcctgcgtcagggtcgcgagatgatccaatggtcttcaccaaaaccacaaaacggtgactggcacatcggtcgtggcgtcgccattatcatgcagaaatcgggtatcccggatatcgatcaggctaactgcatgatcaaactggaatcagacggtacctttatcgttcattctggcggtgcggatattggtactggtttggatactgtggtgacgaaactggcagcagaagtgctgcactgccccccgcaggacgtgcatgttatctccggtgataccgatcatgcgttgtttgataaaggcgcatatgcctcgtccggtacttgcttctcgggtaacgctgcgcgtttggcagcggaaaatctgcgggagaaaatcctgttccacggcgcgcaaatgttgggtgagccagtggcagatgttcaactagcaacgccgggcgtcgttcgcggcaagaaaggcgaagttagtttcggagagatagcccataaaggcgaaaccggcaccggctttggttcactggtgggaactggcagttatatcacgcctgatttcgccttcccgtatggcgcaaacttcgctgaagttgccgtcaacacgcgtacgggtgaaatccgcctggataaattctacgccttgctggactgcggtacaccggtcaatccagagttagcgctgggacaaatctacggtgccaccctgcgtgctatcggccacagtatgagcgaagagatcatttatgacgccgaaggtcacccgttaacgcgtgatttacgcagttacggcgcaccgaaaattggtgacattccgcgtgatttccgcgctgtgctggtgccgagcgacgataaagtcggcccattcggggcgaaatcgatctcggaaatcggtgtaaatggcgccgctccggcgattgctaccgcaattcacgatgcctgcggcatctggttacgcgaatggcatttcacaccggagaaaatactcaccgcgctggaaaaaatataagtaataaatggccgcttcggcggcctgtttctctgtttgaacgatgactaaatagtgactgcgaaaatgagataagccgttctcaaggcgtcctgcgccccaaattcgtgggaatttattttactaattcagatgatcaaatttactttaaaaggagtgaagggatgtctgatataaaccatgcaggttctgaccttatatttgaactggaggatcgccctccctttcatcaggctctcgtaggtgccattacccatctgttggcaattttcgttccgatggtaacccccgcgttaatcgtgggtgcggccttacagctttccgctgaaacaactgcctatcttgtttctatggcgatgatcgcctctggtattggtacctggttacaagtaaaccgctacggcatcgtcggttctggtttactttcaattcagtcagtcaatttttcatttgttacggtcatgattgcgctgggtagcagcatgaaaagcgacggttttcacgaagagttaatcatgtcgtcgctcctcggcgtctctttcgttggcgcatttctggttgtcggctcttcttttatcctgccctatttacgtcgggttattacgcctaccgtcagcggcattgtggtgctgatgatcggcttaagcctgattaaagtcggcattattgattttggtggaggatttgcagccaaaagcagcggtacgttcggcaattacgaacatctcggcgttggtttattggttttgattgtggtgatcggctttaactgctgtcgcagtccgttgctacgcatgggagggatcgccattgggctatgtgtcggctatatcgcatcgttatgcctgggcatggtggatttcagcagtatgcgcaatttgccgttaatcaccatcccgcatccgttcaaatacggctttagttttagcttccatcagttcctggtggttggcacgatttatctgcttagcgtgctggaagctgtcggcgatatcaccgccacggcaatggtttcccgccgtcccattcagggggaagagtatcagtcccgactgaaaggcggcgtgctggcagatggtctggtttctgttatcgcctccgctgtcggttcattaccattaaccacgtttgcgcaaaataatggggttattcagatgactggcgtcgcttcacgttatgtcgggcgaaccatcgcggtaatgctggttatcctcggcttatttccgatgattggcggcttcttcacgaccattccctcagcagttctgggaggcgcaatgacgttgatgttttccatgattgccatcgcagggattcgcatcatcatcaccaacggtttaaagcgccgagaaacacttattgtcgccacgtctttaggtttagggcttggcgtctcctacgatcccgaaatttttaaaatattgccagcctctatttatgtattagttgaaaaccctatttgtgctggcgggttaactgcgattttattaaatattatcctccctggtggctaccgacaggaaaacgttctgcctggtattacctcagcggaagagatggattaacagtaaaggagtcaatgatgtcaggagaacacacgttaaaagcggtacgaggcagttttattgatgtcacccgtacggtcgataacccggaagaaattgcctctgcgctgcggtttattgaggatggtttattactcattaaacagggaaaagtggaatggtttggcgaatgggaagacggaaagcatcaaattcctgacaccattcgcgtgcgcgactatcgcggcaaactgatagtaccgggctttgtcgatacacatatccattatccgcaaagtgaaatggtgggggcctatggtgaacaattgctggagtggttgaataaacacaccttccctactgaacgtcgttatgaggatttagagtacgcccgcgagatgtcggcgttcttcatcaagcagcttttacgtaacggaaccaccacggcgctggtgtttggcactgttcatccacaatccgttgatgcgctgtttgaagccgccagtcatatcaatatgcgtatgattgccggtaaagtgatgatggaccgaaacgcaccggattatctgctcgacactgccgaaagcagctatcaccaaagcaaagaactgattgaacgctggcacaaaaatggtcgtctgttgtatgcgattacgccacgcttcgcccctacctcatctcctgaacagatggcgatggcgcaacgcctgaaagaagaatatccggatacatgggtacatacccatctctgtgaaaacaaagatgaaattgcctgggtgaaattgctttatcctgaccatgatggttatcttgatgtttaccatcagtacggcctgaccggtaaaaattgtgtctttgctcactgcgtccatctcgaagaaaaagagtgggatcgtctcagcgaaaccaaatccagcattgctttctgtccgacctccaacctttacctcggcagcggcttattcaacttgaaaaaagcatggcagaagaaagtcaaagtgggcatgggaacagatatcggtgccggaacaacttttaacatgctgcaaacgctgaacgaagcctacaaggtattgcaattacaaggctatcgcctctcggcatatgaagcgttttacctggccacgctcggcggagcgaaatctctgggccttgacgatttgattggcaactttttacctggcaaagaggctgatttcgtggtgatggaacccactgccactccgctacagcagctgcgctatgacaactctgtttctttagtcgacaaattgttcgtgatgatgacgttgggcgatgaccgttcgatctaccgcacctacgttgatggtcgtctggtgtacgaacgcaactaataataaaactttaacatcctcgtgaggacatcattatgtctggagacatcctacaaacaccggacgcaccaaagccacagggcgcgctggataattattttaaaattaccgctcgtggcagtaccgttcgtcaggaagtactggctggcttaacgacctttctggccatggtttattccgttatcgtcgttccgggaatgctgggcaaagcaggttttcctcccgcagctgtgtttgttgccacctgtctggtcgcgggcttcggctcgttgctgatggggttatgggccaatttgccaatggcgattggttgcgctatttccttgacggcgtttaccgcattcagtctggtactcgggcaacaaattagcgttcctgtcgcactgggcgcagtctttctgatgggcgtcatcttcaccgctatttccgtaaccggtgtgcgtacctggatcttacgtaatttgccgatggggatcgctcacggtacaggtatcggtatcggcctgtttctgctgctgattgctgctaacggtgtgggaatggttatcaaaaacccgattgaaggcttgccagtggcgctcggtgcctttacctccttcccggtgatgatgagcttactggggctggcggtcatcttcggtctggaaaagtgccgcgtacccggcgggatcttgttggtgattattgcaatttcgatcatcggcttaatctttgacccagcggtgaagtaccacggtctggtggcgatgccaagcctgactggcgaagatggtaagtctctgattttcagcctcgatattatgggcgcactccagccaactgtacttccgagtgtactggcattggtgatgaccgcagtgttcgacgccactggcaccatccgtgccgtcgccggtcaggcgaatttgttggataaagacaaccagatcatcaacggcggcaaagccctgaccagtgactcagtaagttcaatattctccggcctggtgggcgcagcgcccgcggcggtttatatcgaatcagcggcaggaaccgccgccggggggaaaaccggtttaaccgcaaccgtggttggtgtgttgttcctgatgattctgtttttatcaccgttatcgtttctgatccccggttatgccacagctcccgcactgatgtacgtgggtttgctgatgttaagcaacgtctcgaagctggatttcaacgattttattgacgcaatggctggcctggtgtgtgccgtgttcatcgttctgacttgtaatatcgttaccggtattatgctgggctttgtaacactggtggtgggtcgcgtctttgcgcgcgaatggcaaaagctgaatattggtacggtgatcattactgccgcactggtcgcgttttacgcgggtggttgggcaatctaatagattctccgcgcctttcagcgcggagatttctttcacagaggattctcactgctggcaacaatacgctgctggcggactcgcctgagttctctttcagtcagcaactgcagcgcctgtgtcgggcaagattcaacgcaggctggcccctcttcccgctgttcacagagatcgcatttcacgatttgttgccgggtatcccccggcaatgactgaatggtgatcattccaaacgggcacgcactgacgcaactctgacagccaatacaacgggcagaatttgcctgcaccacctgctcgcccatcgtcagcgcccccacgggacaagcgccaacacaaggggcgttttcacactgatggcacatcaccggcgcactgatgctatccagccgttgtaccttcagccggggtaaaaagatatcggcattcaactcctgttctgaagggtgagcgaccacacaggccacttcacaagtacggcagccaatacagtcagccggattaacgataattaacgatttcatcacgatgccttcgtatcaaacagagttaacatatcgcgcgccgcctgccttcctgcggccattgcagtgacaaccagatctgcgccatgaactgcatcaccaccagcaaagacttttttcagatgcgtctgggtgggtaaatacccgacgtcgccggtttgaatcaggccccatttatcgagtttaattccgctgccctgcaaccacggcatggtatgtgcctggaaaccaaaggccataatgagaacatcggcgggcaattcaaactctgaacccgcaaccggacgaggacgacggcggccatccggccccggctcacccatagcggtacgaatcaggcccaccgccgttaagcgtccatcttcatcacaagcgatatattgcggctgaacattgaactgaaactcaacaccttcctcgcgggcattgaccacctctttgcgcgaacccggcatactgacttcatcacgacgatacgcacaggtcacgctggcagcattaaggcggatggaagtccgcaaacaatccattgtcgtatcgccaccgcccaataccacaactcgcttaccttccacatccgtcagcggatactctgcagactccggcaatcccatgagctggcgggtatgggcggtcaggaacggtaacgcctgaatgacaccaggcgcatcttcatgcggcagatctgctcgcatcatcccgtaagtccccacgccgaggaaaacagcatcatattccgccgttaattcgttgaaagagatatcgcggccaatttcacagttgagatggaaatcgattcccattgcggtgaatatctctcgccgctggcttaataccgttttatcgagtttgaaaggaggaatgccaaaagtcagcataccgccaatttctggatggcgatcaaagacatcaacctgaactcccgcgcgcgccagaatatcagcacaccctaatcctgcaggtccagcgccaatcaccgccactttttcgctacggggaacaactttgctgacatcgggacgccagcccatcgccagcgcagtatcggtgatgtagcgttccagattaccgatagagactgcgccagagtgatctttcaaagtacatgcaccttcacaaagacggtcctgtggacataccctgccgcagatttcgggtaaggaactggtctggtggcaaagttctgccgcttcaataatctttccttcctgtaccagacggatgtaatccggaatagcgttatgcagcggacaatgccagttgcagttagctttttcggcacaataaacacagcggtcactctcataagtcgcttgttgtggatccagcccgcaatagatttcgccaaagtgggttttccgttcactcgctgaaattttatctgcgcctttacgcgagttaacggggagcaacgctgcactgcgagatggctgagcgtctgatgacgcttttcctgctgccgttttgcgctggcgggccacctttatctgctgcaaccctttatcgtccatcagccgtaacgcctgtgttgggcagacgtcaatacaggcttgcgtgccggaactgcgctggttacaaaggtcgcatttctgtgcaatcgtatcgaccatctcaacgacgccaaaggggcaagcgattgcgcatcttttacaaccaatacatttttgctcgtccagttgtacgctatcggactggaaagtcagagcattaaccggacaagccgtaacgcaaggggcattgttgcagtgatggcaggccaccggattcgcagcctggcctttccctacaacgtggatacgcggtcgaaagtcactgtgactcagcggccagttttcttgattatgtgccaccgcacaggcaatttcacaagcatggcagcctatacattccgcagcttcagcagcgataaacttattcatttgcatccctttcatttaatgagttatgtcttctcaaatttcgcgatgcaataaacgggcatatattaggtagcatgaccgttttaattataattttgcaactgagttcaaattattgcccctcaatctatgccgctttcattatttcaacattgccgatcaaaagaatgctatccagataaaaacgattaaatgcgagagtgcgacatgccagaatgattaatgaaatatcaatatgagaaaattacagataattccattgtcaggttctcttctcattttcgtggtttaaccacgattatgtgattgcctccgcaattcctgtctctaactccccttcctcgcaaaaactggcactccacgagcatgtgtttagacagtttcatgaacataaacggttgctttttactctggcgggcgaaaggagaaacactgatgagcgccatagattcccaacttccctcatcttctgggcaagaccgcccaactgatgaggttgaccgcatattatcaccaggaaagctgatcatactcggtctgcaacacgtccttgtcatgtacgcaggtgcagtcgctgttcctcttatgattggtgaccgactcggcctatcaaaagaagctattgcgatgctcattagctcggatctcttttgctgcgggatcgtcacattattgcaatgtatcggtatcggccgctttatggggatccgcctgccggtgattatgtcggtgaccttcgccgctgtaacaccaatgatagctattggtatgaacccggatatcggcctgctggggatattcggtgccactatcgccgcgggttttatcaccacattattagcgccacttatcggtcgcttgatgcctttattcccgccactggttaccggtgtggtgattacttctatcgggcttagcatcattcaggtgggtattgactgggccgccggaggtaaagggaatccgcaatatggtaatcccgtttatttaggtatctcctttgccgtcttaatttttatcttgctcattactcgctatgcgaaaggatttatgtccaacgtcgccgtattactggggattgtatttggctttttactttcgtggatgatgaatgaagtcaatttatccgggctacatgatgcttcatggtttgcgattgtcacgccgatgtcatttggtatgccgattttcgatcccgtttccattctgaccatgactgccgtgttaatcatcgtgtttatcgagtcgatggggatgttcctggcactgggtgaaatagtcggtcgtaaactctcttcacacgatattattcgcgggctgcgtgtcgatggtgtagggacaatgataggcggaacgtttaacagcttcccccacacgtcattttctcaaaacgttggcctggttagcgtgacgcgcgttcatagccgctgggtgtgcattgcttccggtatcattttgatcctgttcggcatggtgcccaaaatggcggtgctggtggcctcgattccgcaatttgtgctgggcggcgcggggctggtgatgttcggcatggtactggcgacagggattcgaattctgtcgcgctgtaactacaccactaaccgttacaacctctatattgtggcgatcagtctcggtgttggcatgacgccaacgctctctcacgatttcttttctaagttaccggccgtactgcaaccgttgctgcatagcggcattatgctcgcaacccttagcgccgttgtgctgaacgtcttctttaatggctaccagcatcatgctgacctggtgaaggaatccgtctctgataaagatttaaaagtcaggacagtacgtatgtggcttctgatgcgcaagctgaagaaaaatgagcatggagaataatatgaatcttttaatgcgcgctatattcagtctgctgttgctttttactctctctattcctgtcatttctgattgtgttgcaatggccattgaaagtcgcttcaaatatatgatgctgcttttttaaatggtttttacctgtcgacatccgctcaaaacgggcggttgtcgataaacgctcacttggttaatcatttcactcttctattatctataatgatgagtgatcagaattacatgtgagaaattatgcaaacggaacacgtcattttattgaatgcacagggagttcccacgggtacgctggaaaagtatgccgcacacacggcagacaccctcttacatctcgcgttttccagttggctgtttaatgccaaagggcaattattagttacccgccgcgcccttagcaaaaaagcatggcctggcgtgtggactaactcggtttgtgggcacccacaactgggagaaagcaacgaagaggcggtgatccgccgttgccgttatgagcttggcgtagaaattacgcctcctgaatctatctatcctgactttcgctatcgcgccaccgatccgaatggcattgtggaaaatgaagtgtgtccggtatttgccgcacgcaccaccagtgcgttacagatcaacgatgatgaagtgatggattatcaatggtgtgatttagcagatgtattacgcggtattgatgccacgccgtgggcattcagtccgtggatggtgatgcaggcgacaaatcgcgaagccagaaaacgattatctgcatttacccagcttaaataaaaaaccccgacatttgccggggttgtgagcataacgtaatgcttatttcaccggacgcatcgccgggaacagaataacgtcgcggatggtatggctgttggtgaacagcattaccatacggtcgataccaattcccagaccggctgtcggtggtaagccatgttccagtgcggtgacataatcttcgtcgtagaacatcgcttcgtcgtcacctgcatctttcgcggcaacctgatccaggaagcgctgcgcctgatcttccgcgtcattcagttcgctaaagccgttaccgatttcacgcccaccaatgaagaactcaaagcggtctgtgatttccgggttaacgtcgttacgacgcgccagaggagaaacttctgccggatattcagtaatgaaggtcggctggatcagatgtgcttctgccacttcttcgaagatctcggtaacgatacggcccagaccccagcttttctcaacgtggatgccgatagattcagcaatcgctttcgcagagtcgaagttgtccagatccgccatgtcagtttccgggcgatatttcttgatcgcttcacgcatggtcagtttttcgaacggtttaccgaagtccagcgttacgtcgccgtaggtcacttccgtcttaccgagaatatcctgtgccagagtacggaacagcgattcggtcagctcgataagatctttgtaatctgcgtaagccatatagagttccatcatggtgaactctgggttatgacgtacggaaataccttcgttacggaagttacggttgatttcgaatacacgctcgaagccaccgaccaccagacgcttgaggtacagttccggcgcgatacgcaggtacatgtcgagatccagcgcgttatggtgagtgataaacggacgcgcagcggcaccgccagggatcacctgcatcatcggcgtttcaacttccataaagccgcggttcaccatgaactggcgaataccagagaggatctgcgagcgcactttaaaggtgttgcgggattcatcgttagagatgagatccagataacgctgacgatagcgcgcttcctgatcctgcaagccgtggaatttatccggcagcggacgcagtgctttggtcagcagacgcagctcggtacagtggatagacagttcgccggttttggttttgaacagtttacctttcgcgccgaggatatcgccgaggtcccattttttgaactgctcgttgtaaacgccttccggcagatcgtcacgggcaacgtacaactgaatgcgaccgccaacgtcctgcagggtaacgaaagacgctttacccataatacgacgggtcatcatgcggccagcaacggcgacttcgatgttcagcgcttccagttcttcgttctctttaccgtcgaattctgcgtgcaattggtcagaggtatgatcgcgacggaaatcgttcgggaaggcaatcccctgctcacgcaggttcgccagcttctcacgacgcgttttcagttcattgttaagatcgactaccgcgtcagcgccctgtgcgtgttgttcagacatgttggttcctcataaccctgctttcaaacttgcttcgataaattgatccaggctgccgtccagcacggcctgcgtgttgcgggtttctaccccggtacgcagatctttaatgcgggagtcatcaaggacataagaacgaatctggctgccccagccgatgtcggatttattgtcttccatcgcctgtttctcggcatttttcttctgcatctccagttcataaagcttcgctttcatctgcttcatggcctggtctttgttcttgtgctgggaacggtcgttctggcactgagtcacgatcccggtcgggatgtgagtaatacgcaccgcagattcggtacggttaacgtgctgaccgcccgcgccggacgcgcgataaacgtcaatgcgcagatccgccggattgatttcgatatcgatatcgtcatcaacttccgggtaaacaaacgcggagctgaacgacgtgtggcgacgaccgccggagtcaaacgggctcttacgcaccaggcggtgaacgccagtttctgtacgcagccagccgtaagcgtaatcgccggagattttgatcgttacggatttaatacccgccacttcaccttccgactcttcgataatttcagttttgaaaccacgcgattctgcccagcgcagatacatacgctcaagcatgctcgcccagtcctgtgcttccgtaccgccagaccccgcctgaatatcgaggtagcagtcggcgctgtcatattcgccagagaacatacggcggaactcaagctgcgccagtttttcttccagggcgtcgagttcagcaacggcttcgttaaaggtttcttcgtcgtcagcttctacagccagttccagcagaccagaaacatcttccagcccctgtttcatttggtcgagggtgtcgacaacggcttcgagggaggaacgctctttacccagcgcctgtgcgcgttcgggttcgttccagacatccggctgttccagctcggcgtttacttcttccagacgctctttcttggcgtcgtagtcaaagataccccctaagaacgtcggagcgttccgtgaggtcctgaatgcgattatttaccggattaatttcaaacatggtctgatttcttttattgagctagtcaaaatgcggtgataagagcgggattgtacccaatccacgctcttttttatagagaagatgacgctaaattggccagatattgtcgatgataatttgcaggctgcggttgccgcgaaactcgttgatatcgagcttgtaagccagttgcacttcgcgcacaccgttatccggccagagggcggtatcgacattaaaagcaatcccgtccagcagtggaccgccgccgaccggttcgaccatcaccttcaaatgacgctcgcccaccagccgctgttgcaacagacggaaatgaccgtcaaacaacggttccgggaacatctgcccccacgggccagcatcacgcaacagctgcgccacttccatggtcatctctgccgcacttaatgggccgtctgataccacttccccttgcaataaagaaggatctaaccactcggtaaccagttcgccaaagcgttgctgaaagagttcgaatttatcctcttccagcgacaatcctgccgccatcgcatggccgccaaacttgagcatcatgccggggtaaagcgtgtctagccgctccagcgcatcgcgcatatgcagcccctgaatggagcgaccggaacctttcagcgtaccgtcgcccgcaggcgcaaaggcgataaccggacggtgaaaacgctctttgatacgcgatgccagaatgccaacaacgccctgatgccattcagggtgatacattgccagcccacctggcagcgtgtcgcggctacgttccagcttctcgcacagagtgagcgcttcaacctgcattccctgttcgatctctttacgtgtttggtttagtgcatcgagttcattcgccagcacacgcgcttcgccaatgttgtcacacaacaacagcgccacgccaacggacatatcgtccagtcgcccggcagcattgagacgtggccccagcgcaaaacctaaatcgctggcggcgagtttttgtggatcgcgattggccacttccagcagcgctttaatccccggacggcactttccggcacggatgcgactcatcccctgccaggtcagaatgcgattattagcgtccagcggcacgacgtccgccactgtccccaacgctaccagatccagcagttctgccagattaggaattgcgatgccgcgctcatcaaaccagccctgatcgcgcaaaaaggtgcgcagcgccagcatcagataaaacgccacacccacgcctgccagtgatttcgacgggaaattacagtcgcgcaagttagggttaatgatcgcttccgctgcgggtaatgtgtcgcctggcaaatggtgatcggtaacaataaccggaatgcccaacgaacgagcgtgttcaacccccgcatgggaggaaataccgttatccaccgtgacaattaactgcgcgccacgggcatgagcctgatcgactacttccgggcttaagccgtaaccgtcttcgaaacggtttggaaccaggtagtcgatattgctgcaaccaagcgagcgcatcgccagcacgcttagagccgtgctggtcgcaccgtcggcgtcgaaatcaccgaccacaataatccgcgttccttcgcgaaaagcgttgtaaaggatctcaacggccttttcgacgccgctcagttgctgccagggcagcatgcctttaacactgcgttccagttcctgcgcgctacgcacaccccggctggcatataaacggcgcagcaagggaggcaattcagcgggcaagtcggccgtttcatcgacttctcggcgacgaagttgtatctgttgtttcacgcgaattatttaccgctggtcattttttggtgttcgtcgaggaattctttcatgtctttcggcggctggtaacccggaacaagtgtgccattgctcagcacaactgccggagtaccgctaacgccaagctggacgccaagtgcgtaatggtcggcaatatccacgtcgcagctggctggtgcgacgcttttacctgccatcacatcatcaaacgctttgtttttatctttcgcacaccagatagctttcatttctttctctgcatcgctgtccagcccctggcgcgggaaagcaagataacgcacggtgatccccagcgcgttatagtctgccatttgctcatgcagtttgtggcagtaaccacaggtaatatcagtaaacacggtgatgacgtgtttttcctgcggcgctttataaacgatcatctctttttcaagcgcattcaactgctttaacagcatcttattggtgacattgaccggagccgtgccactaacgtcatacattggcccctgaatgatatgtttaccatcatcggtgatgtacaacacaccgctgttagtcagaactgtcttcatgccagctacgggcgcgggctgaatatcgctgcttttgatgcccattttggctaacgtttgttgaattgccgcgtcatcagcctgaacaaagcctgaaaacgctgccaacaaggtaaataacataaaacctttcttcataaattttcctgttcttttcagacatcacgcccgcgggtgatgctgttgatgaagttgccgcagacgctcggtagcgacatgcgtataaatttgcgtggtggagagatcgctgtggcccagtagcatctgcaccacgcgcaaatccgcaccatgatttaataagtgagtggcaaaagcgtgacgcaacacatgcggtgacagcttttcgctgtcgatacccgccagcacggcataatgtttaatgcggtgccagaaggtctgtcgcgtcatctgctgcgcacgctggctgggaaacaacacgtcaattgacacaccattcaacagccacggacgcccatgttccagataggtttccagccagtaaaccgcctcttcacctaacggcaccaggcgctctttgttgcctttaccaatgacccgcaccacgccctgacgcaggctgatatcactcattgtcagcccgaccagttcagagacacgcagtccggtagcatacaacacttcaagcatggctttatcgcgtagctccagtggctgatcaattaatggtgcctgtaataaacgttcgacctgcgcttcgcttaaatcttttggcaaacgctggggcaatttcggtgaagcgagatgcgcactgggatcatcttcacgaaacttttcgcgataaagatactggaacaatcggcgcactgcactcagcaaacgcgctgagctggtggctttatatccgccctccagccgttctgccagtaatgcctgcaaatcgtcactttgcgccgtcgccagcgtcaacccgcggtgatgcaaccactccaccatcattgacagatcgcgacggtaagcgttcaacgtattttcagccagatttttttccagccacagagcatcaagaaactgctcgatgcgtgccagatcctgtttcacttgcgccccttatggtcactcatttgatccattatgccttattgtgccgtgactaaagcgattctgatacactagccgcaaaagccacagcagaatcgagaagcttacgttatgaatatgggtcttttttacggttccagcacctgttacaccgaaatggcggcagaaaaaatccgcgatattatcggcccagaactggtgaccttacataacctcaaggacgactccccgaaattaatggagcagtacgatgtgctcattctgggtatcccgacctgggattttggcgaaatccaggaagactgggaagccgtctgggatcagctcgacgacctgaacctcgaaggtaaaattgttgcgctgtatgggcttggcgatcaactgggatacggcgagtggttcctcgatgcgctcggtatgctgcatgacaaactctcgaccaaaggcgtgaagttcgtcggctactggccaacggaaggatatgaatttaccagcccgaaaccggtgattgctgacgggcaactgttcgtgggtctggcgctggatgaaactaaccagtatgaccttagcgacgagcgtattcagagctggtgcgagcaaatcctcaacgaaatggcagagcattacgcctgatgtcactgacggcttagcacatatgctttgccgtcatctttatctttgcgtctcttgttgtaacaatatccgccgtaaatcccgccattcggcttcgtccatgctgtcagctgccagccataaatgttgccgttttccgctgtcagaacgtaaacgcagcatcatgccgctcttaatcatccacggcgctttgacgatgctccactcctgcccttgccaacgcaaacgcccgtccatcaacaagcgaatttccccctggcgagcattaatgcgccgctggctgcgaacgcaatcaaacaccaccagcgaaagtaacaccatccataacggggtgtaactgagcggccagggcatgagtaaaataacagcggcaaccagcccatgaatcagcaaggaaagccactgtgcgcgccaggagacgcgcaaatcagattgccacaggaccacgttcccggttccgtgtctggatgagtcggaccatcatttccagttctgcatcggccggtttaccgtgattcatcagccagttaaacaggtccggatcgtcacattccagcaaacgaataaagatgcgtttttcgtcatcgcttaagctgtcgtactcatgttcgaaaaacggcatgattgaaatatcgagttcgcgcataccacggcggcatgcccaatgaatgcgggctttgttgttaatgtccatcttcttcctgtctcacgaaaatccagtacccggctattgtaacgtgtttttcgacttcttttacgggaatatcagtaaacacaatcgcgatcgcgaaattaattcacaacaattcaagggcttcatttttttggaagtcgcctcgcagaaggcacagatcgcgtagtgaaagcacttgcattgcctcatagctcttttaccattagttattaatacgccgttaagcaactcaggactctattatggcttttacaccttttcctccccgtcagcctacggcttctgcccgtttgccactgacgctgatgacgcttgatgactgggcgcttgccactattactggcgcggacagcgaaaaatatatgcaaggccaggtgacagcagatgtcagccagatgactgaagatcagcacctgctcgccgcccattgcgacgccaaaggtaaaatgtggagcaatttacgtctgttccgcgacggcgatggctttgcatggattgaacggcgcagcgtgcgtgaaccgcagctgactgaactgaaaaaatatgcggtgttctctaaagtgaccatcgcgccagacgacgagcgtgtgctgcttggtgttgccggttttcaggcgcgcgccgcgttggcaaatctctttagtgaactaccttcgagagaaaaacaggtagtcaaagaaggcgcgaccacgttgctatggtttgaacacccggcagaacgtttcctgatcgtaaccgatgaagctactgccaatatgctgaccgataaactgcgcggtgaagcggaactgaacaatagccaacagtggctggcattaaacattgaagcgggttttccggtgattgatgccgccaacagcgggcagtttatcccccaggcgaccaacctccaggcgctgggcggtatcagctttaagaaaggctgctataccggacaagagatggtggcgcgagcaaaattccgtggtgccaacaaacgcgcgctctggttgctgaagggtagcgccagccgactgccggaagctggtgaagacttagagctgaaaatgggcgagaactggcgtcgtaccggtacggtgctggctacggtcaaactggaagatggtcaggttgtggtgcaggttgtcatgaataacgatatggaaccggacagcatcttccgcgtgcgtgacgatgcgaatacattgcgtatcgagccactgccatattcgctggaagagtaaatctctgtatcgcatcaggcatttatcgcctgatgcgacactggtgtgtcttttcaggcctacaaaggcacgccaattacgcctgcccaatatacaaatagatcgccagaaagtggcacacactaccgccgagcacaaagccgtgccagatggcatgattgtatggaatgcgcttgcagacgtagaaaatcaccccgagcgaataaaccacaccgcctaccgccagtaaggtaacgctgcccgccgcgagcttaactgccatttcataaattaccaccagcgacagccagcccatcgctagataggtcaccagagataaaattttgaatcggtgcgcgatggtcagtttaaacagaatacccagcaatgccaggctccagataacaatcatcaacccgcgcgctaacggagaatccagccccaccagcaaaaacggcgtgtaggttccggcaatcaacagataaatggcacagtggtcaaatttcttcagccacatttttgcccgttgatggggaatggcgtgatagagcgtcgaagcgaggaacagcaggatcatactgccgccatagaggctgtaactggttatcgccgtggcgctggcattgagatccaccgcctgaaccagtagcaacaccagcccaacgataccaaacaccagcccaatgccgtgactgacgctgttggcaatttcctctgccagcgaatatccctgcttaatgaggggcttctgaaccataacttactccggaaaaacgtacacgcacatgtatacctctccagcgtaactgagaatagttccagtgaacacctgttagctaaaataaattctgatttgagattaatctccgaaaaatcatgaaattaaatgcaaaatttcaactaacaggcgtgagttcaatttaaagacatttaaattcaatcacataaaactgtgtctggtcgggatagatgtcggcaatgacctttttcagttcagtcagggtcatattttcctgctctgcatgtttttccgtcagcgtatccagcgttacggttgaggttgcggtgacttcaatcgtgcaaaaataaccgtcatcttcaaaacgtccgacacgaagcacatcacccgttttgaagtgcgattcagactcgtcgcggatggtgatggttttacgcccagccagaatgtcatcctggaaacgttgaaaaaaagtgatgtcgtttggctgcatggtaatatttcctgtaagaattgactcatctggagcctatgatagtgaaaaaactcaccttaccgaaagatttcttatggggcggcgcagttgccgctcatcaggtcgaaggcggctggaacaaaggcggcaaagggccgagcatttgtgacgttttgaccggtggcgcacacggcgtgccgcgcgaaatcaccaaagaagttgtgcctggcaaatactatccaaaccatgaagccgttgatttttatggtcactacaaggaggacatcaagctatttgccgaaatgggcttcaaatgttttcgtacttccatcgcctggacgcgcatttttccaaaaggcgatgaagctcagccaaacgaagaagggctgaagttctacgatgatatgatcgatgaactgctgaaatacaacatcgaaccggtgatcaccctctcccactttgaaatgccgctgcatctggtgcagcaatacggtagctggaccaaccgtaaagtggttgatttctttgtccgtttcgcggaagtggtattcgaacgctataagcacaaagtcaaatactggatgaccttcaacgaaattaacaaccagcgtaactggcgtgcaccgctgttcggttactgctgctccggcgtggtgtataccgaacatgaaaacccggaagagaccatgtatcaggtgctgcatcaccagtttgtcgccagcgccctggcggtgaaagccgcgcatcgcatcaacccggagatgaaagtcggttgtatgctggcgatggtgccgctctatccttactcctgtaacccggacgatgtgatgtttgcccaggagtcgatgcgcgaacgttacgtctttaccgatgtgcagttgcgtggctattacccgtcctatgtgttgaacgagtgggaacgccgcggatttaacatcaaaatggaagacggcgatctggatgtactgcgcgaaggcacctgcgattatctcggcttcagctattacatgaccaacgcggtgaaggccgaaggtggcaccggcgatgcgatttctggtttcgaaggcagcgtaccgaatccgtatgttaaagcgtctgactggggctggcagattgatccggttggtctgcgctacgcactttgcgagctgtatgagcgttaccagaagccgctgtttattgtcgaaaacggttttggcgcttacgacaaagtggaagatgatggcagcatcaatgacgattaccgcattgattacctgcgtgcccatattgaagagatgaaaaaagcggtgacttacgatggcgtggacctgatgggctacacgccgtggggctgcatcgactgtgtgtcgttcaccaccgggcagtacagcaaacgctacggctttatctatgtgaataaacatgacgacggtactggcgatatgtcgcgttcacgtaagaagagctttaactggtacaaagaggtgattgccagcaacggcgagaatctgtaattagccgatgtgcctgatgtgctccgctcatcaggcctggcactcttttaatatattgagctcgcaatattttatattacgcctcagccgaaacacacaaagcgcactttattaacaagcgaaaaaggcgccgaagcgcctttataagatagtcgaatcagtaaattactggtattcgctaatcggtacgcaggagcagaacaggttacggtcgccgtaaacatcatccagacgtttcacggtcggccagtatttgtctgccacacctgccgggaatactgcaacttcacggctgtacggatgcgcccactcggcgaccagttcgctttgaatgtgcggcgcattcaccagcgggttatcttccagcggccagacaccggctttcacctgatcaatttctgcgcggatagccagcatcgcatcgataaagcgatccagttccactttgctttcagattcagtcggttcaaccatcagcgtacccgccaccgggaacgacatggtcggcgcgtggaaaccgtagtcgatcaggcgcttggcaatatccagctcgctgatgccggtttcttctttcagcgggcgaatatcgagaatacattcgtgcgccacgcgaccgtcgcgaccggtatacagcaccgggaaggcatcctgcagacggctggcaatatagttggcgttaagaattgccacctggcttgcttttttcagcccttctgcgcccatcatgcggatgtacatccagctgattggcaggatagaggcactaccgaacggtgccgcagaaaccgcgccctgacgggttaacatgccttcgatttgcaccacgctatgacccggtacaaacggagccagatgcgctttcacaccgatcggtcccatacccggaccaccaccgccatgcggaatgcagaaagttttatgcaggttaaggtgggaaacgtccgcaccaataaagcccggcgaggtgatgccaacctgagcgttcatgttcgcgccatcaaggtaaacctgaccgccgaactgatgcacgacttcacacacttcacggatcgtttcttcatacacgccgtgggtagaaggataggtcaccatgatacaggagaggttatcgcccgcctgttccgctttcgcgcgcagatcagtcagatcgatgttgccgtttttatcacacgcaacaaccaccacctgcattcctgacatatgcgcggaagccgggttagtgccgtgcgcagaagccgggatcaggcagatatcgcgatgcccttcgttgcggctttcatgataatgacgaatcgccagcaggcccgcgtattcgccctgtgcgccagagttcggctgcatacaaacggcgtcgtaaccggtcagtttcaccagccagtcagccagctgcgcgatcatctgctgataaccttcagcctgttctggcgggcagaacgggtgcagttcggcaaattccggccaggtgatcgggatcatctcggcggcggcgttcagtttcatggtgcaggaacccagcgggatcatcgcctgattcagcgccagatctttacgctccagcgagtgcatatagcgcatcatttcggtttcgctgtggtagcgattaaacaccggatgggtgaggatttcgtcgtcgcgcagcatcgcagcctgaatagagcgactgtcgtgagccacgtctttgtccagtgtgtcgatgtccagcccgtggttatcgcccaacagcacgctgaaaagctgcatcacgttttcgcgcgtggttgtttcatcaagggtgatcccaaccgcgttcagaatatcgctacgcaggttgatttcagccgcttcggcacgcgccagcacgcccgctttgtcggccacttccacacacaaagtatcgaaatagtgcgcatggcgcagcttcagacctttttgttgcaggcccgccgccaggatatcggtcagacggtggatgcgattagcgatacgtttcaggccaaccggaccgtgataaacggcatacaggctggcaatgtttgccagcagtacctgggaagtacaaatgttggagttcgctttctcacgacgaatatgttgctcgcgagtctgcatcgccatgcgcagagcggtgttgccagctgcatctttcgatacaccgataatacggcccggcattgagcgtttgtattcgtctttcgccgcaaagaatgccgcgtgtgggccaccatagcccatcggtacgccaaagcgttgcgccgaaccaaaaacaatatccgcgccctgtttacccggcgcagttaacagcaccagcgccataatatcggcggcaacgctgaccacgattttgcgtgatttcagttcgctgataagcgcggtgtagtcgtgaatttcaccagtagtgccgacctgctgtaacagcacgccgaagacgtcctgatggtcgagcactttttgcgcgtcatcgacaatcacttcaaaaccaaaggtttcggcacgagtacggaccacatccagcgtttgcggatgaacgtcagaagcaacaaagaagcggttggcatttttcagtttactgacgcgtttcgccatcgccattgcttcggcggcagcggtggcctcatccagaagagaagccgaagccatatccagcccggtcaaatccagcgttacctgctggaagttgagtagtgcttcaaggcggccctgggagacttcaggttgatacggagtatacgcggtataccagcccggattttccagcatgttacgcaggataaccggcggtagctgcacggcggtgtaacccatgccgatgtaagacgtgaagcgtttattgcgactggcaatagccttgagttctgccagtgcggcgtattcggtcgccggtgcgccaacctgcggtggtgtcgcaagctgaatatctttcggcacaatctggccggtcagcgcgtttaacgattgtgcaccaacggcattcagcatttcttgctgttgcgcggcgtccggtccgatatggcgttcaataaaagcgccgctgttttcaagctggcttaacgtctgtgtcatgagcgatggttcctgaaacgtgcagtgaattgtgaacctctctccttgcgaagagagtgagggtgaggcgtaaatttcctcaccctgatcctctcccgcagaagaggaataaagccgttactcgtcttctaacaatgcttcgtatgcggttgcatccagcagtgattccagttcgctttcatcgctggctttgattttgaaaatccagccgcctgcatacggttcgctgttcaccagttccggagaatcgctcagtgcatcgtttaccgccacgatttcaccgcttactggcgcataaatatctgacgccgcttttaccgattcggcaaccgcgcagtcatcgcccgcgctaaccgttgcgcccacttccggtaggtcaacaaacaccatatcgcctaacagctcctgagcgtgttcggtgatgccaacggtgtaagtgccgtcggcttctttacgcaaccattcgtgttctttgctgtatttcagttctgctggtatgttgctcatcaatcaatctccaaaaaagtaaatcacgcgacggctttgccgttacgcacaaaaacaggtttcgtcactttaaccggcatttcacggttgcgaatttgcacaatcgccgtttcaccaataccttccggcacgcgcgccagcgcaatgctataacccagcgttggggagaaagtaccgctggtgataatgccttcatgctggttgccctgcgcatcagtaaaacgtaccggcagttcattacgcagcacgcctttttcggtcatcaccagaccaaccagtttttctgtgccatgttcacgctgcgcttccagagcttcacgaccgataaagtcacgatctgccggttcccaggcgatagtccagcccatattggcggctaaaggagaaatagtttcgtccatctcctggctatacaaattcatgcccgcttccagacgcagcgtgtcacgcgcgcccaggccacatggcttaacgcccgcttccaccagcgcgcgccagaaatcggccgctttttcattgggcagcgcaatttcgtagcccgcttcaccggtgtaaccggtggtggcaataaacagatcgcccgcctgcacgccaaagaacggtttcatcccttccaccgcctgacgctgggcgtcattaaacagtgtggcagcttttgcctgcgcattcggcccttgtacggcgatcatggaaaggtcatcacgaacagtaatttcgatgccgaaaggttcagcgtgttgggtaatccaggagaggtctttttcgcgggtggcggagttaacaacgaggcggaagaaatcttcagtaaagtagtagacgatgagatcatctatcacaccgccagaggcattcaacatccccgagtaaagggctttgccgcttttggtgagcttcgccacatcgttcgccagcagataacgtagaaactcccgggtgcggctgccgtgaagatcgacgatggtcatatgtgacacatcaaacattccggcatcggtacgtaccgcatgatgttcgtcgatttgcgaaccgtaatgcagcggcatcatccagccgtggaaatccaccatgcgagcgccgcaaagcgtgtgttgttcatacaaaggagtctgttgtgccatcttgtcctcattgaataagcggggctgacaactttttcatggtgaaattatcaccacgaaacccagcatcggagccactcccggtccccaacgcaatcgttctcttttgcctgaacttaccaccgaaacagactgttaaccataaggttaaattgatcatcacattagcttatggttaaaaaacgccaaaatcgtaacagaataaaaaaccaaaaaatgaacaaatctctatataaagataaatagatgagaaagttaatttgaataagacaacattaagaactaaaaaaatgtcaaaaaacactaaatcaaaaattcgtggcattagaaaatataatgcgaaatcgcaggtgaaattagtttatttcaaatgaggaaaatctcccggcgaaaaaaccgggagatgaaagtgtgatgggtatcaaataaacagcagaagagaaatatttaacgcagccattcaggcaaatcgtttaatcccattgcctgacgaataagttgtggcttaacgccaggaagcgtatcagccagtttcagaccaatatcacgcagcaattttttcgccggattagccccggaaaacagatcgcggaatccctgcataccagccagcatcagcgccgcgctgtgcttgcggctacgctcatagcgacgcaggtaaatgtactgcccgatgtctttaccctgacgatgcaaccgtttcagttcagcaatcagctctgcagcatccataaagccgagatttaccccctgccccgccaacgggtgaatggtatgcgcggcgtcgcccaccagcgccagacggtgcgcggcaaactggcgcgcataacgccccgttagcgggaacaccaggcgctcactttcaaccttgcataagcccaggcgattatcaaaagcgatatttaacgcgcgattaaattcgtcttcactagcctgctgcatccgcagcgcttcctctggcgacagtgaccagacaatcgagcaaagatacggatcgctaagcggtaaaaaggccagaatgccttcgccatggaaaacctgccgcgccaccgcatcatgcggttcttccgtgcgaatggtcgccaccagcgcgtgatgctgataatcccagaaagtcagcggaatatcggctttgttgcgcaaccaggaattagcgccgtctgcgccaatcaccagacgcgccgttaacatgctgccatctttcaacgtcaggaaggtttcattttctccccaggcgacctgctgtaattctgcgggggccaacagagtgatatctgacgactgctgcgctttgttccacagcgcgtagtgaatcactgagttttcaacgatatgcccaagatggttatagcccatgctttgatcgtcaaacgagatgtgaccaaaactgtctttgtcccacacttccataccgtgatagcaactggccctacgagagagaatgtcctgccagacgccaagacgagtcagtaatttttcgctggcggcattgatagccgaaacgcgcagttgtggtggtgcatccgccgccagaggttccggtacgcgctgctccagtacggcaacgcgtaagccgctaccctgtaagccgcaggcaaccgccagcccgaccatgccgccgccaacaatggctacatcaacactttgcattgtttattccttaaaaccgccttcaacgcgccacccaaccaagagtgcgctgcgccagcacatcgcgtgctggggtaaataattccatcgtcatcagcccgatgttgcgcccgacaaccagcggcgtccaacggttggcaaaaagatgtacaaggctgtccgtgacgccgatggttgcttcgcgatcgctctgtcgacgctgctgataacggcacaatacgccgtaatcacccatgtcttctccgcgttcctgcgcctgagtcagggtttccgcaaggctcatgacatcacgcataccgaggttaaatccttgcccggcgatgggatgcagagtttgcgccgcattgcccaccagcacggtacgatgggtaataggtttggcggcgcgggttagcgctagcggataagcactgcgtttaccggcatgagtaattttcccaagtcgccagccaaaggccgactggagttcacggcaaaacttctcgtcgctccacgacagcacctcttcgcgccgttccagtggatgacaccagaccagcgaacagcgtccgtcagacatcggcaacatcgccagcgggccatgttgcgtaaagcgttcaaaagcgcgcccttcatgcgcaacggaagtcgcaacgttcgcaatcacagccagttgttcgtaaggatcctgctgccagtcaacgccgcacacggtggctaacgctgaatgggtgccatcagcggctaccagcacgcggcccgtcagcgtctcaccactctccagcgtcacttcaacgtggctctgagtacgggcaacgttagccacgcgatcagggcaatgcagcgttacaccaggtgctttgcgcagcaatgcaaacagccgttgcccgacattgtgcaattcgacaacctgccccagcgccgccagttggtaatcttctgcggcgagggtgacaaatccagcgtgaccacgatcgctgacatgcactgtggtgatggcagttgcgcaatcagccagagattgccagacgccgatgcgcgccagttgctgacaggtacccgccgccagcgcaatagctcgtccatcaaagcccggatgcgcatgtgactctggcgcggtcgcttcaatcaaatgtactggcagcgccccgtgacttaaccgggaaatagccagcgccagcgtcgtgcccgccatgccgccaccgacgatgattacgctcattgctttctcgcagctgccatcaacgcttcgatttcttccggctttttcaccacgctggcggtgaggttttcattaccggtttcggtaatcacaatgtcgtcttcaatacgaatgccgataccgcgatactgttctggcacttctgcatccggcgcaatatacagccctggttctacggtcagaaccatacccggttccagaatacgcgagcgatcctgaccataaacaccaacgtcatgaacatccagtcctaaccagtggctaaggccatgcataaagaaaggacgatgggcgttctgagcgatcagttcatcaacatcacctttcaggataccgagttttaccagaccgctaaccatgatgcgcaccacttcaccagtgacttcctgaatggaagttcccggacgatacagacgcaggctggtttcaagagactccagcacaatgtcatagatttcacgctgagcctgagtgaatttgccgttgaccgggaaggtgcgggtaatgtcgccagcgtaacctttgtattcacaacccgcgtcaatcaacaccaggtcaccgtcacgcagttcacactcgttttcggtgtagtgcaaaatgcagccgttttcaccgctgccaacaatggtgttataggaagggtaacgcgcaccgtggcggttaaattcgtggtgaatttcgccttccagatggtactcgaacatccccggacggcatttttccatcgcccgtgtatgcgccagtgcggtgatttcacccgcgcggcgaagtacggcaatctcttctggtgatttgaacaggcgcatttcatgaacaacaggacgccagtcgatcatcgttgccggtgcggtgagattttgccgcgaacctttacgcagtttctcaagcgcgctgttcacgatttcatcagcatatgcatattcgccctgggcgtggtaaaccacatccagaccattaagtagttgataaagttgctgattgatttcgctgaatgccagtgcgcggtcaacgcccagtttctctggcgcggcatcctggcctaagcgacgaccaaaccagatctctgccgtcaggtcgcgaacgcggttaaacaaaacgctgtggttatgagtgtcatcgcttttaatcagcaccagcaccgcttccggttcgttaaagccggtgaagtaccagaagtcactgttctgacgataggggtattcgctgtcggcgctacgtgttacttctggtgcagcaaaaatcagcgcggcgctgccgggttgcatttgctctaccagggcctgacggcgacgctgaaactcttgccgggatatatcactcataacactctccttacattttttgtttttagtgtagagtcggtttttgtacttctggcgcggtcggttgcggatgagtaaaggtgtcgtggcataacagcgcggcaacacggacgtactcgatgatctcttcaagcgacatttcaagctcttcctgatcttcgtcttcgtcgtaacccaactgcgcgatgttacgcagatcgtcgatggcttcaccggtttcgccggtcactttgtccagcttcggttgcgtaacgccaagaccaagcaggaagtgattgacccaaccagccagcgcatcagcccgatcgaaaacgctgacatcatcgccatcaggcagataaagctgaaaaaggaagccgtcatcctgcagggcatcgctggtggcagagtgcattttgcgcagtgcctgtgccagctcatgaccgaaagccatgccttcgttcgtcaggtcgtgaagtagcggcagccatgagctgtcatcgttaccgccacatatcatcccactgattaaaccatgcatctcagcaggggtcagacccgtcccttgttggttcagatactggttcatttcgttgtaaccaggcatttcgttctgtatagacataagcattcgtcgtcaaagggaggaatattcatgatatgctaccactttgggccctggtggaccagaaaagggcttgtctcttctcatcagggtagctatagtgtcgccccttcgcagaccatgggtctaaagacgaaggcagcgcagtcaatcagcaggaaggtggcatgtctgcacaacccgtcgatatccaaatttttggccgttcactgcgtgtgaactgcccgcctgaccaaagggatgcgttgaatcaggcagcggacgatctgaaccaacggttgcaagatctgaaagaacgcactagagtcacaaatactgaacagttggtcttcattgccgcattgaatatcagctatgagttagcgcaagaaaaagcgaagactcgtgactacgcagcaagtatggaacagcgtattcggatgctgcagcagaccatagaacaagcgttacttgaacaaggtcgcatcaccgaaaaaactaaccaaaactttgaatgacacttttcggtttactgtggtagagtaaccgtgaagacaaaatttctctgagatgttcgcaagcgggccagtcccctgagccgatatttcataccacaagaatgtggcgctccgcggttggtgagcatgctcggtccgtccgagaagccttaaaactgcgacgacacattcaccttgaaccaagggttcaagggttacagcctgcggcggcatctcggagattcccttcttacctggcaccagccatgacgcaactaccagaactcccactgacattatcccgacaagaaatccgcaaaatgattcggcaacgtcgtcgtacgttaacgccggaacaacagcaggaaatgggtcaacaagccgctacccggatgatgacgtatcccccagtggtgatggcgcatacggtcgctgtattcctctcttttgatggcgaactcgacacccagccactcatagaacaactctggcgcgccggtaagcgcgtatatcttccagttttgcatccctttagtgccggtaacttgctgttcctgaattaccatccgcaaagcgaactggtgatgaacaggttgaagatccacgagccaaaactggacgtgcgcgatgtgcttcccctttcccggttagatgtattgatcacgccgctggtggcttttgatgaatacggtcaacgcttgggaatgggcggtggtttttatgatcggaccttacaaaactggcagcactataaaatgcaaccggtgggttatgcgcatgattgccagttagtagaaaaactcccagtggagaaatgggatattccactgcctgcggtggttacaccgtcgaaagtctgggaatggtaagggcgatacatcccgcatcgccctgattgacatcgttgattctttgacctaatttagtgagtaagggtaagggaggattgttcctcccctgtgactgactgttaataagctgggaaacttatgagtaacagtacaatcagtatgatgacaagtcgcatcataacccttctccttcaagccctcgcttcggtgagggctttaccgttacagccccatgctgccctgccatcgtaaatccccattaaataaacacaacgcattgatctgactttgatttattttctggagcagactcgcaaagtagaatgcgcaatgcggcaacggtgtggagaagggataaaaaaacgggcaagtcagtgacctgcccgttaattttcagagaaggggaattagtacagcagacgggcgcgaatggtacccggaatagctttcattgcctgcagcgctttttcggcaacgtcttcgtcggcttcaatatcaataactacataacccatctgggcggaagtttgtagatattgcgcggcgatgttgacgccctgctcggcaaaaattttgttgagcgcagttagcacgcccggacggttttcgtggatgtgcatcagacgacgcccaccgtgcagtggcagcgagacttccgggaagttcaccgcagagagcgttgagccattgtcagaatacttgatcaatttacccgcaacttccaagccgatattctcctgcgcttcctgagtcgaaccgccaatgtgtggcgtcagaaggacattgtcgaattcacacagcggagaggtaaatggatcgctattggtcgccggttccgtcgggaatacgtcgattgccgcccccgccagatgtttgctcgccagcgcgtcacacagcgctggaatatccaccacagtaccgcgcgaagcattaatcagcagcgagccgggcttcattagcgaaatctctttcgcgcccatcatatttttggtggacggattctctggtacatgcagactcaccacatcgctcatattcagcaggtcagaaagatgctgtacctgagtggcgttgcccagcggcagtttgttttcaatatcataaaagtaaacatacattcccagcgattcagccagaatgcccaattgcgtaccaatatgaccgtagccgatgatacccagctttttgccgcgcgcttcaaaagaacccgccgccagtttgttccacacgccacgatgcgctttagcattggcttctggcacgccgcgcaatagcagcagcagttcgccaatcaccagctccgcaacagagcgcgtatttgagaacggtgcgttaaataccgggatcccgcgctttgccgccgcatccagatcaacctgatttgttccgatacagaaacagccaatagcgaccagtttttctgcggcgttgatcacgtcttcagtcagatgggtacgggatcgcaggccgatgaagtgggcatcgcggatggattcttttaattgttcatcatccagcgcgcctttgtgaaattcgatgttggtgtaaccagctgcacgaaggctttccagcgccttttggtgcacgccttctaccagcagaaacttaatcttgtctttctccagcgatacctttgccatttacccaatcctgtcttttgaaatgttgtgtgcggatttgcatccgcctttcaacatatcaaaaaataatattgcggcaatatgaacgtttgcgtcgcgatgttgaggaaatatcacgcaaaagtatttcttggatgaatatgctggtttagaagatttatttagagcaatcgacaattgccaggtaaaaacgtgacacatgtcaccaaatttaatgaagagaatttttttaacgggggaggttcccccgtcagatcatttcacaatagttttgacaccgtcaggtgtgccaatcagcgcaacgtccgcgccacggttagcaaacaaaccaacagtcaccacaccaggaatcgcatttatggcgttttccatcgctatcgggtcaaggatttccatgccgtggacgtcgaggatcacgttgccgttatcggtcactacgccctgacggtattccggacgaccgcccagtttcaccagctggcgcgccactgcactacgtgccatcgggataacttctactggcagcgggaatttgcccagaatatcaacctgcttggaagcgtctgcaatacagataaatttttccgcaaccgaagcaatgattttttcacgggtcagcgccgcgccgccgcctttgatcatttgcatgtggccgttgatttcatctgcgccatcaacgtagatgccaaggctgtcgacttcgttgagatcaaaaacgtgaatgccgaggcttttcagtttttcagtggaagcatctgaactggaaacggccccttcaatctggcctttcattgtaccgagtgcgtcaataaagtgtgcggcggtggaacctgtacctacaccaacaatggtgccgggctgaacatactgaagtgccgcccatcctactgcttttttcaattcatcctgcgtcatgatcgtttcgcctgtggtatgaaatttcacacgcattatatacaaaaaaagtgattcagaccccgttggcaagccgcgtggttaactcatccataaaatatcgcgcaatggcgggcatcccctttcgccccgcaaataaagcatacaacggtctggggatgccgctccacggtgcaaacaggcgcaccagttccccgttcgcaagcccctgtttacaggcaaactgaggcaataacgccacgccattcaacacaaccagggcgcgaactcgctgagcgaaatgcattagcgcaaatccctgatcttttaagctgcgcgttaaccactgatacaaatgttacccgccaacggcttcggtatatgcaacccgacacaaaattgtgtcatagtgcaggaaaaagcatttaccaggagcagacaacagcaatgaaacgcccggactacagaacattacaggcactggatgcggtgatacgtgaacgaggatttgagcgcgcggcacaaaagctgtgcattacacaatcagccgtctcacagcgcattaagcaactggaaaatatgttcgggcagccgctgttagtgcgtaccgtaccgccgcgcccgacggaacaagggcaaaaactgttggcgctactacgccaggtggagctgctggaagaagagtggctgggcgatgaacaaaccggttcgactccgctgctgctttcactggcggtcaacgccgacagtctggcgacgtggttgcttccggcactggctcctgtgttggctgattcgcccatccgcctcaacttgcaggtagaagatgaaacccgcactcaggaacgtctgcgtcgcggcgaagtggtcggcgcagtgagtattcaacatcaggcgctgccgagttgtcttgtcgataaactcggtgcgctcgactatctgttcgtcagctcaaaaccgtttgccgaaaaatatttccctaacggcgtaacgcgttcggcattactgaaagcgccagtggtcgcgtttgaccatcttgacgatatgcaccaggcctttttgcagcaaaatttcgatctgcctcctggcagcgtaccctgccatatcgttaattcttcggaagcgttcgtgcaacttgctcgtcagggcaccacctgctgtatgatcccgcacctgcaaatcgagaaagagctggccagcggcgaactgattgacttaacgccagggctattccaacgccggatgctctactggcaccgctttgctcctgaaagccgcatgatgcgtaaagtcactgatgcgttgctcgattatggtcacaaagttcttcgtcaggattaatccatcaaataatgcctgatagcacatatcaggcgttatcctcacttctttttgtattccttgaatcacattacaaaatagacaaatctcaggcggcaaaaaacgacgtctgaatgcatttttttgctggagacaaacccacgtaaaaagctcaccgtaagcgcaaataccctcattttgattgcgttttacggagcaaataatgtctaacgtgcaggagtggcaacagcttgccaacaaggaattgagccgtcgggagaaaactgtcgactcgctggttcagcaaaccgcggaagggatcgccatcaagccgctgtataccgaagccgatctcgataatctggaagtgacgggtacccttcccggtttaccaccctacgttcgtggcccgcgtgccactatgtataccgcccaaccgtggaccatccgtcagtatgctggtttctcgacagcaaaagagtccaacgctttttatcgccgtaacctggccgcccaccgaggctacgactccgataacccacgcgtggcgggcgacgtcggcaaagcgggcgtcgctatcgacaccggggaagatatgaaagtcctgttcgaccagatcccgctggataaaatgtcggtttcgatgaccatgaatggcgcagtgctaccagtactggcgttttatatcgtcgccgcagaagagcaaggtgttacatccgataaactgaccggcaccattcagaacgatatcctcaaagagtacctctgccgcaatacctatatttacccgccaaaaccgtcaatgcgtattatcgcagacatcatcgcctggtgttccggcaacatgccgcgatttaataccatcagtatcagcagttaccacatgggtgaagcgggtgccaactgcgtgcagcaggtagcatttacgctcgccgataggattgagtacatcaaagcagcaatctccgccgggctgaaaattgatggcttcgtccctcgcctgtcgtttttcttcggcattggcatggatctgtttatgaacgccgccatgttgcgtgcggcacgttatttatggagcgaagcggtcagtggatttggcgcacaggatccgtataacaacgttatccgcaccaccattgatcattgtgcacatcctatgtgtcgggattatctgcatcgctatctggaaaatgcgtccggcggacatattcaccacgatcttagccacgtcttcgacttacaccgtaatttaattgcaaccggatcgatgctgggttaatggtttgtcccgtcacgatcttcagcaatatgctgaagcatcgtggcggtataacgatgatttctgattgaataaagatattcctgcatatacatcggcctgtgcggcgcatcaaaatatttcagcgttgccggattcaccagtcgccaggcaaaatgcgggatcaccgtcagaaaatgtccccgctccacgtcgctgattttggccataaaactatagggacgataaataatggttggattgatcccacaaggacgcatattcgcatcaatcattgcttcgaagttagcccggttttgaaagcgcatttgtagccagggcagctcctgaagcagctcttgctcttgtcgctcttcataacggcgagaaacgagaaagcccaatcgcagcggcggtagttcactgatagtcaggttttccagttcctgaactcgtgcagatacatgctgtggggagattataaaatctaactgacggtcaaaaagattatcgataacgccatttgcgctgaactcaactggctgggcggtcacgccttcgtacttatctccgagactaatcaactgatcaaaaataatggtcggataagtattatctatgcctatcacaatgtctcgtgaacgacgtcctgagttatggatttcattatcaatcgcagaaagtcgttgataaaccgggaacagtttttgatacagttcctgtccggctttattgaggctgatattattatctttgcgggtaaatagcgtatagccaatttgttcttccagcgcggcaatgcttttgccaaatcgcgaagccgtcatatggattttttctgccgcccgggcaatattattggtttgcgctaataaaatgaaattgcgcatctttttcgaaataaaaatgtccatcccccctctcccgcatccttgtccgcttaaccgtttcagtcagcctatccttgatgaaaccgcgagcaaagataggtgattacgtcatggttttacagaaaaaggaggcaatatcgggtaaaggcattagcccgacgaatacgtcgggctacaagtattaatgtgcagcaggtgttttagcgggtggttgatccacaggttctaactggaagattacatcgacctgatcatcaaactgaatagcggcctgctcgtaagtttcctgggcggacaccggcgcggcatcggctttcatcatccgcaccattgggctgggctgatagttggaaacatggtagcgtacgctatataccggccccagtttacgatgaaagccgttcgccagttcctgcgcctgatgaatcgcgttatcaatcgctgccttacgcgctttgtctttataggcatccggctgcgccacgcccagcgacacagaacgaatttcgttaagacccgcctttagcgcgccgtccagcaaggaattcagtttgtctaactgacggagcgtgacttccaccgttctcactgcgcggtagcctttcaggatacttttaccatcctgataatcataatctggctgagtgcgtaagttcgctgagctgatatcttttttcgcgatctgattgagctcaaggaaggaaatgtattgtgcgacgcgctcatctgcctgtttcttggcagtagcggcatccttcgcggccacgttaacttcaatcgcaagagtggcaatgtctggcaccgcatccacgcttgccgtaccggaggtgacaatatgcggtccatccggcaattcgttagcctgcgctgccatcccgctaatacccattaatgccgccagggcgataactttgaacttcacgttagtctctccgtgttaattgacttgcccaaaattcaggacctctggaggcaagcttagcgcctctgttttatttttccatcagatagcgcctaactgaacaaggcttgtgcatgagcaataccgtctctcgccagctgcaaggcaataaaccacataacacatcccactaccagattgataatgcgctgtgattttgccgtgcgcaggcgcggtgccagccaggctgcgagaatagccagaccaaagaaccacaggaaagaggcgctaattgttccgagcgcaaaccaacgttttggttccacatcaagttgcccgccaaggctgcccagcacaacaaaagtatccaggtaaacatgcggattcagccaggtcactgccaacatggtggcgataattttccatctgccttgtttcaggacttcggcactggctaactcaatgttactgctcattgctgttttaaaagcgccaaaaccataccacagcaagaaggctacgccgccccaggtgaccagcgccagcaaccacggcgactgcatcaataacgcgctgccaccaaaaatccccgcacaaatcaggaccaaatcgctgatagcacaaagtaaggcaatcataatgtggtactgacgacgaatgccctgattcatcacaaaagcattttgtggaccgagcggtaggatcatagccgccccaagtgcaagaccttgaaagtaataagaaaacacgttggatattccgaattaagtatctgatgcagagactatatcgcgggattgttattagcggaaattgataatattaattggcaatcagaaaaactaataagagagaggccagagagtattatctggcctcagcgttgattacgcagctttgtcttctttcacccgcttaaagttcacatccatttgcgggtacgggaagctgataccggcggcatcaaattcacgtttaatacgctccagcacatcccagtacacgttttgcagatcgccgctgttgctccagacgcggaccacgaaattaatcgacgatgcgccaagttcgttcagacgcacagtcatttcgcgatctttcaaaatgcgatcttcagactggataatatcggtcaggatctgcttaacctgatcgatatcggaatcatacgccacgccaataataaattcgttacggcgagctggctcgcgggagaagttaataatattcccggcaataattttaccgttcggaataacgataattttaccgtctgcagtacgcatggtggtggagaaaatctgcacactcagcacagtaccggctacgccgccgaggtcaacatattctccggcacggaacgggcggaacatgacaagtaacacgccagcggccaggttagacagtgacccctgcaaagccagaccaacagctaagcctgcggcaccgagtacagcaatgactgacgctgtttgtacgcccacgcgccccagtgcagcgattagcgtaaaggcgataattccgtaacggactaatgcagaaagaaaatcagcaacagtggcatcgattttacgggagatcatcaggcgattcaccgcgttggaaatcatccgcgcgataatcaaaccaacgatgatgatcgcgagtgccgccacgatgtttactgcataacttagcagcagcgcctggttagccaccagccagcttcccgcgccgtttatgctatcgacaacattcaaatcttccattcaatattccttttcaactgactcaaaatggagaaatacactccgccgccttatgacgggcagtctgacaagggtaaacaataaagcataattttgccaaatagatcacagatttctcatctgtatcaccttgcttttggcgaaaaaaagacccgcagagcgggccttgagataagcagaaaggaatatcttacagaacgtcgatcgcgttcagttcctggaatgctttttccagacgagcgatcatcgaagtctgaccggcacgcagccatacgcgcggatcgtagtatttcttgttcggctgatcttcgcctttcgggttgcccagctggccttgcaggtaagcttcgttttctttgtagtagttcagaacaccttcccaggttgcccattgggtatcggtatcgatgttcattttcactacgccgtagcttacggagtctttgatttcctgagcagtagaaccggaaccaccgtggaatacgaagttcaggctgttgtgcggcaggttgtgtttcttagaaacatattcctgagagtcgcgcaggatggtcggagtcagaacaacgttacccggcttgtaaactccgtgtacgttaccgaaggacgcagcgatggtgaaacgcgggctgattttgctcagctcggtgtatgcgtaatcaacgtcttccggctgggtgtacagtgcagaagcgtccatgtggctgttgtccacgccgtcttcttcaccaccggtgcaacccagttcgatttccagagtcatgccgattttggacatgcgctccaggtatttagagcagatttcaatgttctcttgcagagattcttcagacaggtcaatcatgtgagaagagaacagcggcttaccggtagcagcgaagtgtttttcacccgcgtccagcagaccgtcgatccacggcagcagtttcttcgcgcagtggtcggtgtgcaggataaccggaacaccataatgttcagccatctggtgaacgtgatgcgcaccagagatcgcacccaggatagcagcgccctgcggaacgtcagatttcacgcctttaccagcgataaaagaagcaccaccgttggagaactgaacgataaccggcgctttaactttagctgcggtttccagtacggcgttgatggagtcagtaccgacgcagtttactgctggcagtgcgaagttgttttcttttgctacctggaaaactttctgtacgtcatcaccagtgattacgccaggttttacgaaatcaaaaatcttagacatgtctcttgtcctgtatcgtcgggccttatactcgtcatacttcaagttgcatgtgctgcgtctgcgttcgctcaccccagtcacttacttatgtaagctcatgggattcactctcttgtcgccttcctgcaactcgaattatttagagtatgaaaaagtgcgtgctttaaaagcgcgctgcaacaagggcaggtttccctgccctgtgattttttacttcttagcgcgctcttcgagcatcgctactgcaggcagtactttaccttccacgaattcgaggaatgcgccgccgccagtggagatgtaggagattttgtcagcaatgccgaacaggtcgattgctgccagagtgtcgccgccgccagcgatggagaacgcttcgctgtctgcgatagcgttagccacgatttcagtacctttgcggaagttcgggaattcgaacacgccaaccggaccgttccacaaaatggttttcgcattcttcaggatttcagccagttcctgagcggaagcatcaccgatatccaggatctgctcgtcagctttcacatcgttaacagatttcagggtagccggtgcagtttcagagaactcggttgctacgcgaacatcagacggaaccgggatgttgcaggtggtcagcagacgtttagcttcgtcaaccaggtcagcttcgtacagggatttacccacatcgtggccttgtgctgcgataaaggtgttagcaataccaccaccaacgatcagctggtcagcgattttagacagggagtccagaacggtcagtttagtagatactttagaaccaccaacgatagccaccatcgggcgagcaggttctttcagtgctttacccagcgcgtccagttcagctgccagcagcgggcctgcgcacgcaacgtcagcgaatttaccgataccgtgagtagaagcctgcgcgcggtgagcagtaccgaatgcgtccattacgaacacgtcacacagtgcagcgtattttttggacagagtttcgtcatctttcttctcgcctttgttgaagcgaacgttttccagaacaaccagttcaccttcagcaacgtcaacgccgtcgaggtaatctttaaccagacgaaccgggttagacagtttgtctttcaggtagttaacaaccggcagcagagagaattcttcgttgtactcgccttcggtaggacgacccaggtgggaagttaccatcacttttgcgccttgtttcagggcaagttcgatggtcggcagagaagcacggatacgcgcgtcgctggttactttcccgtcttttactggtacgttcagatccgcacggataaatacacgtttcccagcaagatccagatcggtcatcttaattacagacatggtgaatcctctcgttgattctaaaagttttgcagacgctgcttgcgtcttacctgaaagcaacagtagccatagctaacgtcgtgtcgagcattcggttagcaaagccccattcgttatcgcaccagaccaacgttttgatcaggtgtgcgccactgacccgggtttgggtgccatcgacaatggcactgtgcggatcgtggttaaaatctacagagaccaacggcaattccgtatagtcaactataccatgaaatgcaccttgtgctgctttttgcagcaacaggttgacttcattggcttttacaggtttcttcaccgtcacgcttaaatcgattgccgtcacatttatggttggcacacgtaccgcaatcgcttcaaagcgatcgttaaattgcggaaaaaatcgtgtgataccggcggccagtttagtatcgaccggaatgatcgactggctggctgcccgggtgcgacgcaggtcaggatggtatgcatcaataacctgttgatcgtgcatggcggagtgaattgtggtcacagtgccggactcaataccgtacgcatcatctaacaatttgatgacgggaattatgcaattcgtggtacaggaagcgttagaaacgatgcggtgttccgcacgaagttgatcctgattgacgccgtaaacaacggtcgcgtcgagatcgttactgccaggatgtgaaaagagcacttttttggccccggcggcaatatgcgcttcgccatgctcacgggagccatatacgccggtgcagtcgaggactacatcaacgccaagttcacgccaggggagcgattgcagtgaacgttcatgcaatacgcggatggcgtcatcaccaacaaaaagttgatcgcgttcctgtcgtacttcccatgcaaaacggccatggctggtgtcatatttcaacaaatgcgccatgcccgcagcatccgccagttcgttgattgccaccacggtaatttccgcccggcgtccggattcatacaaagcacgaaccacattacgcccgatgcgaccgaagccatttatcgctacgcgtacggtcatagatctcctgcaaggttttccctgagcaaatttgccagacagagtaatccagcaaatcgttcggggaaaccttacctgtcgcaaactgcgactgattggttaattgtcgaacatttaatcgactgaaacgcttcagctaggataagcgaaacgtggaataaaaggaatgattgtccagtcaaagaagacaattatctgacttacgtcacgttttcagccccgcccctgtggaatttattccactttgcagaatcacgaataagcgtagcaaaatcttttcgttgtgccgtcacaaaccctgacttatatcagaatatgactgatgcagcgtcgatattatccgcaatacgtccgagtttcggagtactccaatgatgacattgccctacccatattcttcctccgcacgtttttacgcgctgcgcctgctccccgggcaggaagttctctcccaattacgcgccttcgcgcagcaacaacaactccacgccgcgtggattgcaggttgtaccggcagtctgactgacgtcgccttacgctatgccggacaagaaaacactgccctgctaagcggtaagttcgaagtcatcgcattgaacggcacgctggaacagagtggtgaacatcttcatctctgcgtttccgatccacacggcacgatgcttggcggtcatatgatgcccggctgtaccgtgcggaccacgcttgaactggtgatcggctgccttgaggaactggcgtttagccgccagtcttgcgcgctttctggttacgacgagttgcatatttccccccgttaaataactactttcagtgaggttttcttatggcgcgtcgccacttttccagtcaggcattggtgttgatcgttatctctatcgccatcaatatgatcggcgggcaactggccagcatggtcaaattacctatttttctcgactccatcggcacacttattagcgcggtactgcttggtccggtgatcgggatgctaaccggtttactgaccaatttactctggggattgctgaccgacccgatcgccgccgcatttgcgcccgtcgcgatggtcatcggcctggtcgccggttggctggcgcgagcgggttggtttcgcaccctgccaaaagtcgttgttagcggcgtgattattacgcttgcggtaacggtcgtcgctgtaccgctgcgtactgcgctgttcggcggcgtgacaggaagcggagccgatttgttcgttgcctggatgcactcgatggggcaaaacctggtggagtcggtggcgattacggtgataggcgcgaacctggtcgataaaattcttacagcggtgattgtctggcttttactgcgtcagctgccgattcgcaccacgcgccattttccggcaatggctgccgtgcgctaaatgcatccgtttacatccttaacgctgtgggcgctggcggcctgcaccacgcttatcctgcccacacagacaatattgccagtctatagcgcggcgacctttttctgccttattgcgccaaaggccacgcggcggcgggcaaaatatgtcgtctggctgatgttctcgctgggggctggactgtggctggtgcacggtgactggctgacagaatggctaagcggcacgccacgctctccagaacggtgggcgcatgctattacgctctggttgcggattctggcgattgtttcaacctcacagttgtggatgcagtacgtccccgtgcaacgttttatccgcgctttgtttgcttctcgcctgccgccgggcgtcgcttatctgtttgccgggccgttattggtcgttgagcagttaaaacggcaattggcgattattcatgaagcgcagcgcgcccgcggcgtgccgctggatgagggctggtatcagcgtttacgtgcgatgcccgcgttaattattccgctaacacacaatgcgctaaacgatcttgctgtccgtggtgcggcgctggatatgcgggcatttcgaatcaacaataggcgcactacgttatgggcaccagccgatagcaccctacaacgcgtagcacgttacgccatgatattgctaatgctggctgaattcggagcgtggatatggttacgttagaacagtttcgctattgcccgacacactcaacgcatcctccgttctgttatgactttcactatgtcaaaccggggatggtcgccatctttggtgacaacggcagtggcaaaagtacgctggcgcagctgatggcgggctggtatccggactttctaccaggagagataaccggcacggggacgcttctcggtacgcccattgggcgtctcccgtttaatgaacaatccgccaccatccagctcgtccagcaatcgccctatttgcagctctccggctgtacctttagcgtggaagaagaagttgcctttgggccagaaaatctgtgtcttgctgaaaaagagattatggcgcggattgacgccgccctggccctgaccgagtgccagccgttgcgccatcgtcacccggcaacactctccggtggagagacacagcgtgtggtcatcgcctgcgccaccgcgatgcagccaaagctcttaattcttgatgaagcctttagccgcctgacgccgcaggcccgcgaaatgctgttgcagcgcttacaacactgggcgcttgaacgtggttcgctgattattctttttgaacgtcatcacacacctttcctgaaccactgccagcaagcgtggcaattgcaaaacggagcgctccagccactatgttaacgttaaatcagatatcttatcgctggcctggcgcggcaacggattgtctttgcgacatttctctgcaactcaaacaaggtgaatggctggcgctgaccggcgacaatggcgcgggaaaatcgacgctgttacgagtaatggcaggtcttcttacgcccacagccggtacggttatgctgcaacaacaagcgatgaaaaacctgaaaaaccgccagcgcgcggcaaagattggcgtactgtttcaggaagcggaaaatcagctttttcacagcaccgttgctgacgaaatcgcatttggtttgatactgcaaaaatgcccggcggatgaaatcactcaacgtaccaatgctgccctgcaatgctgtcagttagcagacactgccagcgcgcatccgttagatctgcatagtgcgcagcgacggatggtcgccgtcgcctgcctggaagcactctctccgccactattgctactggacgagccgagtcgggattttgacgaaaattggttgagcgtgtttgaaagctggctggagaagtgccgccagcgaggcactagcgtcgtagcaatcagtcatgacgccgcatttacccggcgtcatttctctcgtgtggtgcgactggaagatggtgtaatcaggaacgttaatccatcagacgatattcacccgtagcggtcatcattaaggtcaaatttgcaggcagactctcttccagcacccggcgaacattcggcccgtcggtacggtcataaaaggcttctgcgtctgccagcgataaccctcccgccagcttgcgccccaccagacgctcccgcaacgcagatgcgggagctttgataaagatcgagaaatcacaaaattgcgcaagctggcaccacttttcatcatccagcaacaaccagtttccttcgacgatgacgagtggtgcggtaacgtgcagcgcatcttcaacaggatcatgcttttgtcgatcgtactgcggccacgtacaatccccttccacaacccggcacagattttccgccagtttcgcaacgtcaaatgtctctggtgcgcctttgaaggggcgcaattgatgcgcatccagccagctattgtaatggtgaaaaccatccatcggcagcgtctgaatagcgggcagttccgggtcttgttgcgcgagatattcccagaaggtggttagggtagatttacccgtccccggcggagcgcaaagaaaaaccaccgtacgccgctgcggatttactgtctgtaaggccgccagcatacgcagcaacggtttatgtacattttcaatctcttcgttctggtactgtgcctgtatcttcagcccattcaccgttaattcaattttcacggcgttaattcctttaaggttgtcgttactgccagcgtcagcgccgttttgaccatcccgctaaaacgcgcctctgaccagacggcgaaatcggcgaacttcatcgctttcaacgcgtcatagagcgtcgcattgcgggttatgctattgacgttgctgataaaatcccaggttatgtcatcagcaaatccgggcgtttcatcctgttcgttcaggtaatgccagaactgggaaaagtgcgtgatatcggcatacagccatttatccatcttccccagcgcataaatcaaacgcagcgcaacatcaatatcgtcaagcgggccgctttgggcgagtaacggcttcactgcatattcgacgatctcttcatcgttatcgacaaacagcgacggcagaaactggcgtatcccctggagcaaaatagaatgcgcagttttcataaatgaaaataaattgtcctgtgcatccagttgctcaagcacatcatcttctgtcagcgtcgccattggtcttccgatagatcaccatcaatgcagggagtctattatattacacgtttggtccgcgccgccgatcagtaatgtctgcgtccgcaccccattcgccgtctgttggataccgttcaccaactcgccgcccgtcacgcccgtagcgctaaagaggatatcgttccccctcgccgataaccactcgcccacgaaaagcaacgtcgtttaatgcctggcgcatcgcggtgaccgcaaggccatcaattttatttttgtcgccacagccggtttgcggccaggcagccaacgctgcctgttccgtaacgcgaaataatggccacgccagggacatcattgcgcggcctccccaatatcaacgccaaattgtgccagcagatatttctcggcctgttcattccagataccgtgcgttttctcaaccagccgcgccagctctttaaacagcggatcggttttgcctttttcggcaaaatcggcaatggcggtcagcggcatggtcacgccgttataaatgagttttttaccgccagggatatccggcagattgagcacggtttctggcaccgcatccaggccaccgatatgggtcaccataaacgacggctgtaactgccccgtggcgctaagggcaatcgcctctttcatgtcgtccgtggaaccgccggacgtgccgacaacgtgcgtactgttgtaatggacgttgtagaaattaaacggcactttgaagtttttatctgtcggcccggcgaagaaattcagacaaccatcctccgccagcaattcatccgccatttcaacaacagcaggcaccgccgcataaacaaaaatgtcatcgaacccggcatctcctgtcagcgcccgcagcgtctggaccggatcgctcacccctttggtattcatatacaccagctcaatgcctttactggccgccagttccaccggcagcagcttttgtacctgcgtcaggcgtttgtcgtcgatatcgactaccaccacccgcgacggttgtatgccgccgttaatagcgtaatcgatagcgccaattcccatcgggcctgcacacgccagtagcgcaatattgccgccaggtttgacgcccatgcgatgctcataaacatattgcgtggtgtgataattggcatgataagcgccaataatgcagcacataggctctgccagcgacgccgcagcaaaataagagccgtgatagggtaatacgcagcccaaattaatggcgatttcgggaataatcatataggtggcgttaccgccaaaatattcgtagctgtagcccgctgaatacccgcctggtaaccccatcgccggttgcaatacaaaacgctggccttttttatatttgccagtgagatttttacccacttcgacaataaccccggcacattcatgcccggtaatgaccggatgattttctaaatcgtcggggacgcgtttatgttcactaccgagtaacgccgctttccaggtggataaacaaacgctgtcagaaattacattcactaacagttcattatcggtaatttctggcagctcaaattcgcgcagacggacatcccgcttgccataaatagcagcaactttggttttcatttttacctctgtaatcagtgtttatgttcagcggttaattgattaaataaagtgtcgagttttggatcgccaatatagttattaatcaatatcagtggtttatccgtcacacgtttcacgcgcccttccagactggcgtgagtaacgacgatatccgcatccgcaggcacgttttctatggcgtaatgttttacttcaattgccagccccgctttttccagacgtttacggaaggtggttgcgcccatcgcgctggagcccatccccgcatcgcaaacaaaggcgatacgcttaacccggcttaacgagaatgccccctcttgtttcatcgccttaaccgcattggctgactgagcaaactcatcttcgctctccgtttccaccgttttttccatcttcagtatcagcgaagtgatagcaaaggacaccagggtacctaccgtaacaccggcaattgtcgccaggaacgagcctttcggcgtcagtgccaggtaagcaaagatagaccccggacttgggccagccaccagaccaccgtccagtaagttaaacatccaggtgccagacataccgcccgcaatcatggcaataatggtcagcggcttcatcagcacatacgggaaatacagttcgtggatcccaccgaggaagtgaataatcatcgccccgggcgcagaacgtttactcatccctttaccaaacaaggtaaacgccagcagcagccccagaccaggacctggattggaggccaccatgaagaagatggatttaccgttaaccgaagcctgttgcattcccagcggataatagacgccctgatcgatcgcattattaaggaaaagcactttcgccggttcattgatgactgacagcaaaggtagataacccgcatgtaccagcgcctcaatacactctttgacgaaagtattagcaattaacaccgccgggccgataacttcaaaacccagcagacaaaggagcatccccgcgatacctaatgagaagttattgataaccatctcaaaaccagcaggtatgcgtttttccagcgacttgtcgatatatttaatcaccagaccaccgagcggccccataatcattgagccaaggaacatcgggatttcagcgccgacgatcacaccaatcgtaccaattccgcccatgaccgcgccgcgtttaccgccgaccagatgaccaccggtagaaccaatcatcacgggcaataaataggtaatcatcggaccaacaattttggcgaaatgttcattcggcagccagccggtgggaataaataatgccgttataaatccccaggcaataaaagcaccgatattggggatgaccattgcagtcaaaaagcccccaaaagcctggacctttgcacgagcagacttgttttccataatattatcctgtagaggagagagtaattatccgcggctgataatgtccgctaattgtttttctgatgatgcggttaagagttgttcgagtatttcttcttcgcacagtaattcacttaacgcctgaatagcgccaatgtgcgaattggcatcggcagcagaaagcccgatgagtaatttaatcggttcgtcattccccggaaaataaacgctttgtttaagtaacgtcaaagacatcccggttttaagcgccccacattccgatcgcgcatgaggcattgccacgcctggtgcgagaatataataagggccattgttaatggtggaacctttaattgcctgaatgtaattctcgctgatatagtttttatccagcaatgataccatcgagaaatcgatagcttcctgccaatcttttgctgaatgtataactgagattgatgattttggaaaataatcaataagccgcataaattatccttattttatttttagggtacagtccggcggtaaaaataaaatacgcgtacaaattaacgaaagcaattggacacatgaaaggagaaactccacgagcaaaaataacaaaatattgaataacaacaacatgaaataagcttttaaaaagtcaattataaatctgttaagtaaactacaaaatcaacaaattattcatcactatatttgtgatacacatctctattttcttattgaatgctcgaaaacatacttattacgtttattattttttcgctcatcccctttataaattctgaattatcggctgttgtctgttttctcatcacctcatgtgacatattccccactttactcaaggaagattcatatgaaagcacctgtttcattaacctcatttcgcccacaaaaatctcttgctatcgccattggcgtgcttgccgtggttgtgctgccatttctctcgtattacaccgttaatgaaggtgaacgcggcattttgctgcgctacggaaaaatcgtaaaagttgccgagccggggctgggttttaagatcccttttatggaaagcgtagagaaaatttccacgcgtaatcaggctgtggtctatcagggattacaggcctacagccgcgaccagcaaccggcacaaatgacagtatcagtcagcttccacattaaaccttcagaagcaggcgcggtttataccacctacaacaccattgaagcattaaaagatcgtctgattgtccgtcagttgccaactcaactggagaacgttttcggacaatataccgccatcagcgccgtacaggatcgtacaaaactggttcaggatctgcaaaatgccatgcgcaaagccgttgttgggccagtggtaattgacggggtccagattgaaaatattgatttttctgacgcttatgaaaagtcgattgaagaccgaatgaaagcagaagtcgccattgccacgcgtaagcaaaatctggaaacggagaaaatccaggcgcaaatagcggtaactcaggcccaggcggaagcagacagtaaactagcggcagccaaagcagaagcggaaactattcgcgtaagaggcgcggcagaggctgaaactattcgtttaaaaagtgcggctgaagcagaagctatccgcctgcgcggtgaagctctgcgggagaatcccggacttgttgccctcaccactgctgagcgttgggacggtaaactgcccgataccatgatccccggcagcacagttccgtttatctctactaagtaaaaaagggccgctttcgcggcccttgagactgatagcaaagacaaaactgcctgatgcgctacgcttatcaggcctacatacttcctgcaatatgttgaatttgcaaaatcttgtaggacggataaggcgttcacgccgcatccggcataaacaacgcgcactttgccaacaatctgaagggccgcatttgcggcccttctcacaaagcatcttaccgattacagcagcgcttttgctttcgcaacaacgttgtcaacggtgaagccgaactcttcaaacagctgctctgccggagcagattcaccgaaggtggtcatgccgacgatagcaccgttcaggccaacatacttgtaccagtagtcagcaatgccagcttccaccgcaacacgagcggtaaccgctttcggcagtacggattcacggtaagccgcgtcctgcttgtcgaatgcgtcggtagacggcatggaaaccacgcgcgctttcacgccttcggcagtcagtttttcgtaggcggcaacagccagttcaacttcagaaccggtcgcgatgaagatcagttccggctgaccagcacagtctttcagcacataaccaccgcgcgcgatgtttgccagctgctcttcagtacgttcctgctgcgccaggttctgacgggagaggataagcgcagtcgggccgtcctgacgctcaacgccgtatttccacgctactgcggattcaacctggtcacacggacgccatgtagacatgttcggggtcacgcgcagagaagcgatctgttctaccggctggtgagtcgggccatcttcgcccagaccgatggagtcgtgggtgtaaaccatcacctgacgctgtttcatcagcgcagccatacgtacggcattacgtgcgtattccacgaacatcaggaaggttgaggtatacggcaggaaaccaccgtgcagggagataccgttggcaatcgcagtcataccgaattcacgtacaccgtagtggatgtagttacccgcagcatcttcgttgattgctttagaaccagaccacagggtcaggttagacggcgccaggtctgcagaaccgccgaggaattccggcaacagcggcccgaacgcttcgatagcattctgagacgctttacggctggcgatcttcgccggattagcctgaagtttagcgatgaactctttcgctttggcgtcgaagtcagacggcatttcgcctttcatacggcgggtaaattcagcagcttcctgcggataagctttcgcgtaagcagcgaatttctcgttccatgcgaattctttcgcctggcctgcttctttcgcatcccactgagcatagatttcagacgggatttcgaacggcgcgtatttccagcccagctgttcgcgggtcagggcaatttcagcgtcgcccagcggcgcaccgtgggagtcgtgggtaccggctttgttcggggaaccgaaaccgatgatggttttgcacatcagcagggacggtttgtcagtcactgcgcgcgcttcttctactgcgcgtttgatggatgccgcgtcatgaccgtcgatatcgcgaataacgtgccagccgtaagcttcgaaacgcattgcggtgtcgtcggtaaaccagccttcaacgtgaccatcgatagaaataccgttgtcatcgtagaacgcaatcagtttacccagcttcagcgtacccgccagagagcaaacttcgtgggagatgccttccatcatgcagccgtcgcccatgaaggcgtaggtgtagtggtcgacgatgtcgtggcccggacggttaaactgcgccgccagcgttttttctgcaatcgccataccgactgcgttggcaataccctgacccagcggaccggtggtggtttctacacctgcggtgtaacccacttccgggtgacccggagttttagagtgcagctgacggaagtttttcagttcttccatcggcagatcgtaaccggtgaggtgcagcaggctgtagatcagcatggagccgtggccgttggacagcacgaagcggtcacggtcagcccaggacggattctgcgggttgtgtttcaggaaatcacgccacaggacttcggcaatgtcagccatacccataggggcacccgggtgaccggatttggctttctgtactgcgtccatgctcagcgcacgaatagcattggcaagctctttacgtgaggacattttgactccagatcggatgatgaagggcacgcccttaacgacttgacgacagcgcgttttgggctacgccggaaaatttgccaacaatttaccgcaagccgctcgtcatgtacatggaacatccttttgccgcttcagaaatctctggatcatgctcgcatgttgcgcaatccactcgcccgtccgctgcgcttttccttatactgagactgagcgtcgattcacctgcaaacggcgcatttttagaataatcctgaccttgtgcggaagagaaaacatgaaaattcgcgccttattggtagcaatgagcgtggctacggtgctgaccggttgccagaatatggactccagtggactgctctcatcaggagcggaagcttttcaggcttacagtttgagtgatgcgcaggtgaaaaaactgagcgatcaggcatgccaggagatggacagcaaagcgacgattgcgccagccaatagcgaatatgctagacgtctgacgacaatttctcgcgcgttaggcgataacatcaacggtcagccggtgaattacaaagtgtatatggcgaaggatgtgaacgcctttgcaatggctaacggctgtatccgcgtctatagcgggctgatggatatgatgacggataacgaagtcgaagcggtgctcggtcacgaaatggggcacgtggcattaggccatgtgaagaaaggaatgcaggtagcacttggtacaaacgcaattcgcgttgcggcggcctctgcaggcggaattgtcggcagtttgtcacaatcacaactgggagacctgggcgaaaagctagtcaattcgcaatttacccaacgtcaggaatcagaggccgatgattactcctacgatttgctgcgccaacgcggtatcagcccggcaggtcttgccaccagctttgaaaaactggcgaaactggaagaaggccgccaaagctcaatgtttgacgaccatcctgcatccgccgaacgcgcccagcatattcgcgatcgtatgagcgcggatggagttaagtaaagccaggtagtgccgaacgtaggtcggataaggcgttcacgccgcatctgacaagaatggcacatttgttactccgtgcgcattgccggatgcgatgctggcgtatcttatccggcctacgggtgccgagtgtaggtcggataaggcgttcacgccgcatccgacattaatggcacatcacccgcgcgcctcttatctggcgcttactcgccctttttcgccgcctggatatacagcatctccagcgccagcgtcgccgcagccagagcggtgatttccgactgatcgtatgccggagccacctccactacgtccatcccaacgatgttgagatctttcaagccgcgtaccagtttaatggcgcgatcggaggtcaggccgccaattaccggcgtaccggtgcctggtgcaaaagcaggatccaggcagtcgatatcaaaggtcaggtaaaccggcatatcacccacaatctgtttcacctgggcgataatgtcatccacgctgcgatcgttcacctggcaggcgtccagcacggtaaagccgttgtctttatcaaactcggtacgaataccaatctgcacagaatgattcgggtcgatcagaccttctttcggcgcggtatagaacatggtgccgtggtcaaattcacaaccgttagcgtaggtatcggtgtgggcatcaaagtgtaccaacgccattttgccgaaatgcttcgcatgagcgcgcagcagcggcagcgtaacaaagtggtcaccaccgaaggagagcatacgcttaccggcagccagcagcttctcggcgtgcgcctgcagcttctcgctcatctcacgggcatctccgaaggcatataccagatcgccgcagtccacgacgttcaggcgctcacgcatgtcgaaattccacgggaagcgattgtgttcccaggccagattcgtcgaaacctgacggatcgctgccggaccgtggcgaccacccgcacgaccagaagtggccatatcgaacggcacgccagtaatcacccagtcagcatcgctgtcatatggctggaagttcatcggcaggcgtaaaaaaccaaaggcgttggaaaccagtgagttatcgtattgatgacctaaggtgctcatggatggactcctattacaaagtcgatataaaaaaacccttccgcgtcgttaggcccgacgaggaagggttggatttgtgaaacacaagtttgtgctaattatcgccttaaatgggcgaggcatcaagcgaggttgctatttccgacacggtggcggcgcatagccattgttatctgccggaaaggcttgtccagagcacggcggcagcgcgtttttcgccgggccttgtaattcaaaggcggcaaagccgattacaccggtattacgcacatcgccttgcgccgaattggctgcgtaggaatcagcaacgttggcgaactgaaaagccgcttcggtatgtttatctttgcggaatcctttaatcgctaacgaatctccggcattcacaatataaccgttgttattcagcgaaccttgcttgccgttcagcacatccaggccatcaaccgtagcaacgatctcgtagttggtgttacgactgtaattacggacatataattgataattcattccgactctggcatggacaatatagcgtggttcattattggatgaatcataaacccgcgtaataggtagagaattaaaattaccatcgcgaatagcatattccagttcgttaatacgaatgctataaacgcggtcgtagccggaaggaacattagtcgaataactaataacgatcatctctgccggatcgcgccaggctcgttcagcagatacgccctgaaccgttgagtgcacatccccaccccaggcggtgccgacattgcctgatgcactgctattatactgcgcattactggaacaaccagccagcagcacgattaatgccaccaacgcgctacgtactttccattttttcataaccgttccctctgcatttaattaatgcagcgattgtagggagattatttaataagaaaagcagctaaattatttttaagaatatataaaaagaaagcgggccgatttacgtaaataaatcgccccgccagcagaataatcttaattattcatcttcaagataggtataaccgtacaaacctgcctcgaactcttccaggaactgttgttgcagttcagcatcaagatcggttttcttcacctgatcgcggaactgagttaacagcgttttcggatcgagctgcacatattgcagcatgtccgccacggtatcgccttcgtcagacagttctacctctacgctaccatcagggaagacgaacacgtcaaccgcttcggtatcaccgaacaggttgtgcatgttgccgaggatctcctgatatgcgccgaccataaagaaaccgagcatcggcggattctccggatcgtactccggcataggcattgtcgtggcaataccgtcaccatcaatatagtggtcgatagcaccgtctgagtcacaggtaatatccagcagcacagcgcggcgttccggcacttgatccagcccttccagcggcagaaccgggaacaactggtcgatcccccacgcatccggcatcgactggaacagcgagaagttgacgtacattttgtccgccatacgttcctgcagctcgtcgataatcggacgatgagcacggttttgcggatccagctgcttttgcacttcatggcacatgctcaaataaagctgctcagcccatgcgcgttcttgcaggctaaaggtgccggaagagtagccgatatgaatgtcgtgcagatccatctggctgtcgtgtaaccattcacgcagagaacggcgagttcccggttcgtgcatttcctgccaggtttcccacatgctttgcagggcgcgcggtgcatcttctgcaggcgcggtcggcaccgtgtattcgttacgttccacgccgatgatattcgacaccagcacggtgtgatgcgcagtcaccgcacgacccgattcggtgattaccgtcggatgtggcagaccattttcttcacacgcatcaccaatcgcccagatgatgttgttggcgtattcattgaggccgtagtttacggagcagtcagactgagaacgggtgccttcatagtccacgcccagaccgccgccgacgtcgaagcactgaatattgacgcccagcttgtgcagttccacatagaaacgcgcggattcacgaacgcctgtcgcgatatcgcgaatattcgccatctgcgaaccgaggtggaagtgcagcagttgcaggctgtcgagacgcccggcttcacgcagcgtttcaaccagttgcagtacttgagtcgccgccaggccaaacttcgatttttccccgccggaggactgccatttacccgagccctgcgaagccagacgtgcacgcacgcccagacgaggaacgacattcagacgttctgcttcatccagcacaatggcaatttctgacatcttctcaatgaccagatagaccttgtggcccatcttctcgccaattaatgccaggcggatatattcgcggtccttataaccgttgcagacgatgacgctacgggtcatgccagcatgtgccagcaccgccatcaactcggctttggaaccggcttccaggcccagcggttcgcccgaatgaatcagggactcaatcacgcggcggtgctggttaactttgatcggataaacgaggaagtaatcgccgttatagccgtaggattcccgcgctcgtttgaacgcggcgttaatggaacgcaaacggtgctgcaggatctgtgggaaacagaacagtgcaggcagacgctgaccctgtgcttcgcgagttttcactaactgcgcgagatcgacgcgagcttccgggacgtccgggtccgggcacacgctgatgtggcccagctcgttaacgtcatagtagttattgccccaccaggcaatattgtaagtacgcagcatcttgctggcttcctgggagctcattgcaacctcctgcatggagcgtagtacaccgtgttcgcccgctgacgaaggcaaacccatagacatgtcgtcagacatagcgaacctcaaattattttattaagtgtaaaacagttaacgactatcgcagcctggaactgcgataacaacccataagcacatggattttccagcagtgaatgctgacgctccaactgcgcaaccggtttctttttcataacattattaagcacataaccgaacgtaagtgtgacagttcggcgaaaccacgagaaaactcttgtttttacaagagcgcccttgttcagtcctcagtagctgtaaccagctcttgaatcctgagaagcgccgagatgggtataacatcggcaggtatgcaaagcagagatgcagagtgcggggaacgaatcttcaccagaacggtgagacaggttaagcagcagacaacggttcattatttcgtatcacctccacggccgcctgttaagacgaacccacaagccaaaactctgttttcaacccggctggaagtggcaacacgaaagaaacgtcgtgtgctttttatttaagccgcgcgccgcgttttataccccacaatggcagaaaattgcaaaagataaatacgcagaatgccagcattgtcaggaaaaatttccagccacgtttttaacagaatgagacacgattcaaaaaaaagtggaaattgggtgaagaactgacctaaaatagccatccagatgttaatccatccataccgattaacactcagactgccagtgtttttaacctgcagagtcgtggtaggatccgctaccacagaaaatccacacaacagtttgagctaaccaaattctctttaggtgatattaaatatggcaaaacacctttttacgtccgagtccgtctctgaagggcatcctgacaaaattgctgaccaaatctctgatgccgttttagacgcgatcctcgaacaggatccgaaagcacgcgttgcttgcgaaacctacgtaaaaaccggcatggttttagttggcggcgaaatcaccaccagcgcctgggtagacatcgaagagatcacccgtaataccgttcgcgaaattggctatgtgcattccgacatgggctttgacgctaactcctgtgcggttctgagcgccatcggtaaacagtctcctgacatcaaccagggcgttgaccgtgccgatccgctggaacagggcgcgggcgaccaggggctgatgtttggctacgcaactaatgaaaccgacgtgctgatgccagcacctatcacttatgcacaccgtctggtacagcgtcaggctgaagtgcgtaaaaacggcactctgccgtggctgcgcccggacgcgaaaagccaggtgactttccagtatgacgacggcaaaatcgttggcattgatgctgtcgtgctttccactcagcactctgaagagatcgaccagaaatcgctgcaagaagcggtaatggaagagatcatcaagccgattctgcccgctgaatggctgacttctgccaccaaattcttcatcaacccgaccggtcgtttcgttatcggtggcccgatgggtgactgcggtctgactggtcgtaaaatcatcgttgatacctacggcggcatggcgcgtcatggtggcggtgcgttctccggtaaagatccatcaaaagtggaccgttccgcagcctacgcagcacgttatgtcgcgaaaaacattgttgctgctggcctggccgatcgttgtgaaattcaggtttcctacgcaatcggcgtggctgaaccgacttccatcatggtagaaactttcggtactgagaaagtgccttctgaacaactgactctgctggtacgtgaattcttcgacctgcgcccatacggtctgattcagatgctggatctgctgcacccgatctacaaagaaaccgcagcatacggtcactttggtcgtgaacatttcccgtgggaaaaaaccgacaaagcgcagctgctgcgtgatgctgccggtctgaagtaatctttcttcacctgctttcaaaggccagcctcgcgctggcctttttcttttacctcaccgcagtggacaggcgttcacgccgcatccggcaaaaaaccgcccgcacaataacatcattcttcctcaacacgttttaccgcaaattatcatcactactgaaatcgattacaccaaccacaccagccaaatatttgtaatattttcatattattattcagctttcacagttgttacatttcttttcagtaaagtcttaattgcagataacaacctttaatctatgatgatataactcaattattttcatgcacttaaatcataactaagataaatgttagtgtaagcgattacactgatgtgatttgcttcacatctttttacgtcgtactcacctatcttaattcacaataaaaaataaccatattggagggcatcatgcctgacgctaaaaaacaggggcggtcaaacaaggcaatgacgtttttcgtctgcttccttgccgctctggcgggattactctttggcctggatatcggtgtaattgctggcgcactgccgtttattgcagatgaattccagattacttcgcacacgcaagaatgggtcgtaagctccatgatgttcggtgcggcagtcggtgcggtgggcagcggctggctctcctttaaactcgggcgcaaaaagagcctgatgatcggcgcaatcctgtttgttgccggttcactgttctctgcggctgcgccaaacgttgaagtactgattctttcccgcgttctgctggggctggcggtgggtgtggcctcttataccgcaccactgtacctgtcagaaattgcgccggaaaaaattcgcggcagtatgatctcgatgtatcagttgatgatcactatcgggatcctcggcgcttatctttctgataccgccttcagctacaccggtgcatggcgctggatgctgggtgtgattatcatcccggcaattttgctgctgattggtgtcttcttcctgccagacagcccacgttggtttgccgccaaacgccgttttgttgatgccgaacgcgtgctgctacgcctgcgtgacaccagcgcggaagcgaaacgcgaactggatgaaatccgtgaaagtttgcaggttaaacagagtggctgggcgctgtttaaagagaatagcaacttccgccgcgcggtgttccttggcgtactattgcaggtaatgcagcaattcaccgggatgaacgtcatcatgtattacgcgccgaaaatcttcgaactggcgggttataccaacaccaccgagcaaatgtgggggacagtgattgtcggcctgaccaacgtacttgccacctttatcgcaatcggccttgttgaccgctggggacgtaaaccaacgctaacgctgggcttcctggtgatggctgctggtatgggcgtactcggtacaatgatgcatatcggtatccactctccgtcggcgcagtatttcgccatcgccatgctgctgatgtttattgtcggttttgccatgagtgccggtccgctgatttgggtactgtgctccgaaattcagccgctgaaaggccgcgattttggcatcacctgctccactgccaccaactggattgccaacatgatcgttggcgcaacgttcctgaccatgctcaacacgctgggtaacgccaacaccttctgggtgtatgctgctctgaacgtactgtttatcctgctgacattgtggctggtaccggaaaccaaacacgtttcgctggaacatattgaacgtaatctgatgaaaggtcgtaaactgcgcgaaatcggcgctcacgattaatctcctcaggcttcctcccatcatggaggaagccacctcttgcagtcatcttttcttcgctctatcctctgccgctatgaaaacatcccgtctccctatcgccatccaacaggccgttatgcgtcgcctgcgggaaaaactcgcccaggccaacctgaagctagggcgtaactacccggagccaaaactctcttacacccagcgcggaacctctgccggaacagcctggctggaaagctatgaaattcgtctcaatcccgttttgctgttggaaaacagtgaagcctttattgaagaagtggtgccgcacgaactggcacatttgctggtatggaaacatttcggccgcgtagcgccacatggcaaagagtggaagtggatgatggaaagcgtgctgggcgttcccgcccgtcgtacgcatcagttcgaactgcaatccgtgcgccgcaacaccttcccctaccgctgcaagtgccaggagcatcagcttaccgtacgccgtcataatcgcgtagttcgtggcgaagccgtctatcgctgtgttcactgcggcgaacagctggttgcgaaataaccacctgaactatcaggaactttcctgatctggctgattgcataccaaaacaactttcgctacgttgctggctcgttttaacacggagtaagtgatgtaccgttatttgtctattgctgcggtggtactgagcacagcattttccggcccggcattggccgaaggtatcaatagtttttctcaagcgaaagccgcggcggtaaaagtccacgctgacgcgcccggtacgttttattgcggatgtaaaattaactggcagggcaaaaaaggcgttgttgatctgcaatcgtgcggctatcaggtgcgaaaaaatgaaaaccgtgccagccgcgtagagtgggaacacgtcgttcctgcctggcaattcggtcaccagcgccagtgctggcaggacggtggacgtaaaaattgcgccaaagatccggtctatcgcaagatggaaagcgatatgcataacctgcagccgtcagtcggtgaggtgaatggcgatcgcggcaactttatgtacagccagtggaatggcggtgaaggccagtacggtcaatgcgccatgaaggtcgatttcaaagaaaaagttgccgaaccaccagcgcgtgcacgcggtgccattgcgcgcacctacttctatatgcgtgaccaatacaacctgacactctctcgtcagcaaacgcagctgttcaacgcatgggacaagatgtatccagttaccgactgggagtgcgagcgtgatgaacgcatcgcgaaggtgcagggcaatcataacccgtatgtgcaacgcgcttgccaggcgcgaaagagctaacctacactagcgggattctttttgttaacccctaccccacgcgtacaaccgcgtggggagacgacgcggatttttaactatgcgtatcccccgcatttatcatcctgaaccactgaccagccattctcacatcgcgctttgcgaagatgccgccaaccatatcgggcgcgtactgcgtatggggccgggacaggcgctgcaattgtttgacggcagcaaccaggtctttgacgccgaaattaccagcgccagcaaaaaaagcgtggaagtgaaggtgctggaaggccagatcgacgatcgcgaatctccgctgcatattcacctcggtcaggtgatgtcgcgtggtgaaaaaatggaatttactatccagaaatcgatcgaactcggtgtaagcctcattacgccacttttttctgagcgctgcggcgttaaactggatagtgaacgtctgaacaagaagctccagcagtggcagaagattgcaattgctgcctgtgagcagtgtggccgtaaccgggtgccggaaatccgtccagcgatggatctggaagcctggtgtgcagagcaggatgaaggactgaaactgaatcttcacccgcgcgccagtaacagcatcaatacgttgccgttaccggtcgaacgcgtccgcctgctgattggcccggaaggcggtttatcggcagatgaaattgccatgactgcccgctatcaatttactgatatcctgttgggacctcgcgttttgcgtactgagacaactgcgctcaccgccattaccgcgctacaagtgcgttttggcgatttgggctaacggagaagaataatgatcaagctcggcatcgtgatggaccccatcgcaaacatcaacatcaagaaagattccagtttcgctatgttgctggaagcacagcgtcgtggttacgaacttcactatatggagatggccgatctctatttgatcaatggtgaggctcgcgctcgtacccgtactttgagcgtcgaacagaactacgataaatggtacgagttcacgggtgagcaggatctgccgctggccgatctcgatgtgatcctgatgcgtaaagacccgccgtttgataccgagtttatctactcgacctatattctggaacgtgccgaagataaagggacgctgatcgttaacaagccgcagagcctgcgcgattgtaacgaaaaactgttcactgcctggttctctgacttaacaccagaaacgctggtcacacgcaataaagcgcagctaaaagctttctgggaaaaacacagcgacatcattcttaagccgctggacggtatgggcggcgcgtcgattttccgcgtgaaagaaggtgatccaaacctcggcgtgattgccgaaaccctgactgagcatggcactcgctactgcatggcgcaaaattacctgccagccattaaagatggcgacaaacgcgtgctggtagtggatggcgagccggtgccgtattgcctggcgcgtattccgcaggggggcgaaacccgtggcaatctggctgccggtggtcgcggtgaacctcgtccgctgacggaaagtgactggaaaatcgcccgtcagattgggccgacgctgaaagaaaaagggctgatttttgttggtctggatatcatcggcgaccgtctgactgaaattaacgtcaccagcccaacctgtattcgtgagattgaagcagagtttccggtgtcgattaccggaatgttaatggatgccatcgaagcacgtttacagcagcagtaacccaccttagcgagaaggatctcgttgagactctgagtgacagcgcccttctttccacgcatactgggcgctgttgcttttttgaaccaggaaacagaacctctgacaatgaatttacagcatcactttcttattgccatgcctgctctccaggatccgattttccgtcgttccgtggtctacatttgcgaacataataccaatggtgcaatggggatcatcgtcaacaagccgctggaaaatctcaaaattgaagggattctggaaaagctgaagatcacgccggagccgcgtgatgaatcaatccgtctggataaaccggttatgctcggcggtccgctggctgaagatcgcgggtttattttgcatactccgccttccaattttgcttccagcattcgcatttcagacaacacagtgatgaccacttcccgcgatgtgctggaaacgctcggcaccgataaacaaccgtctgacgtattggtggctctgggttatgcctcctgggagaaaggtcaactggaacaagaaattctcgataacgcgtggctaacggccccggcagatctgaatattctgttcaaaacgccgattgccgaccgctggcgcgaggcggcaaaactgattggtgtggatattctcaccatgcctggtgtggcaggacacgcctgatgagtggaaccttactcgccttcgacttcggcaccaaaagcattggcgtagcggtcggccaacgcattaccggcaccgctcgccctttgcctgcaattaaagcgcaggacggtacgccggactggaacattatcgagcgtttactgaaagagtggcagccggacgaaatcatcgtcggtttgccgctgaatatggacggcaccgaacagccgttaaccgccagagcgcgtaaatttgccaaccgtattcatggtcgtttcggtgttgaagtaaagctccatgacgagcgtcttagcaccgtggaggcacgttccggtctgtttgaacagggcggctatcgggcgctcaacaaaggcaaagtcgactctgcctctgcggttattattctcgaaagctatttcgagcagggatattaaggcgatttactagcgcacagatttctgacaatgtgctcgttgtttcatgttggatgcggcgtaaacgccttatccaacctacagtgagtgcgaattcaaagttacgcttcccttgtaggcccgataagcttgcgcatcgggcatatttacaattcgtatcagacacagcaacgtcacaagcgcccttctttcacccgctgctgataactctgctgaaacgttatcatccccacctgctgcccggtttgaataacatgcggtaactggtgggttttcccttcacgaatcaaattccccaccgcgggtgtgttaatcagtaattcaaacagcgccacgcgtccttcctgtttatccacttccagcttttgtgacaacaccgcccgtaaactacctgccagttgattacgcacgggatctttttcctgcgccggaaacgaatccaccagtcgctcaactgcctgcgctgcgccgcgcgtgtgtaatgtcgccagcaccagatgcccggtttctgccgccgtcagcgccagacggattgtctcgctatcacgcagctctccgagcaaaatcacatcaggatcttcccgcaatgcagcccgcaatcccgatgcgaaagtcatacagtgcaaaccaatctcccgctgttggatcaaacatcgctgactggtatagagatattccacaggatcttccagcgtcagaatatgcgcatcggcatgttgattgagatagccaaccatcgccgccagcgtggtagatttgccgctccccgtcgcccccgtcaccagaatcaggccattctcgctcttgagtaattccggcaataccggtggcgcaccaagctgttcgagctgtggacagtgcgaaggtaacaaccgtaatgccagagaaataccttgccgttgcgcgaacgcactgccacgcaaccgctggttttccgccagcgacacagcaaaatccaactgaccattctccagcaatattgtccgctgatcgtcatccagccactcccgcagtagctcttcgacgtccagcgcatcaaacggcgcagcttccattcgcccgcgaatgcgccatcgtgcgggccaggcgctgcacaggtgtagatccgagacgttatgctttacactaagggccacaatttcttccatattcatactaagatcctcggaaaatgaacgatattgcgcataacctggcacaggtccgggacaaaatctcagcggctgcaacgcgttgcggccgttctccagaagaaattacgctgcttgcagtcagtaaaacaaaacctgcgagcgccatcgcagaagccattgatgccgggcagcgtcaatttggtgaaaactacgttcaggaaggggtagataaaattcgccactttcaggaactgggcgtaacaggattagaatggcattttattggcccgttgcagtctaataaaagccgcctggtggcagagcatttcgactggtgtcataccatcgaccgtttgcgcatcgctacccgtctgaacgaccagcgcccggcagaacttccccctcttaacgtactgattcaaattaacattagtgatgaaaacagtaagtccgggattcaactggctgaactggacgagctggcagctgcggtcgctgaactaccgcgtttacgtctgcgcgggctgatggcaatccctgcgcctgagtcagaatatgtaaggcagtttgaagttgcacgccaaatggctgtagcatttgccggactgaaaacgcgctacccgcatatcgacacgctctctctgggaatgtcggacgatatggaagccgccattgcggcaggtagcacgatggttcgtatcggcactgcaatttttggtgcgcgtgattactctaaaaaataaggaattaaaggaacgccatgaatacgttgactttcctgctttcaacggtcattgagctgtataccatggtgctgttattacgcatctggatgcagtgggctcattgtgatttttacaaccccttctcacagtttgtagtgaaggtaacgcagccgattatcgggccactgcgccgcgttattccggcaatgggccccattgatagcgcctcgctgctggttgcctatattctcagtttcattaaagccatcgtgctgtttaaagtggtgaccttcctgccaatcatttggattgccggtttattgattctgctgaaaaccatcggcctgctgattttctgggtcctgctggtgatggcgattatgagctgggtaagccagggtcgtagcccgattgaatacgtgctgattcagctggccgatccgctgctgcgcccgattcgccgcttgctaccggcaatgggtgggattgatttctcgccgatgatcctcgttctgctgctgtatgtcatcaatatgggtgtcgcagaagtcttgcaggcgaccggaaatatgctgctgccggggctgtggatggcgttatgagtgccgtaacagttaatgatgacggtctggttttacggctctatattcagccgaaagccagccgtgattctattgtcggtttacatggcgacgaggtaaaagtcgccattaccgcgccgccggttgacggccaggccaacagccatctggtgaagtttctcggtaagcaattccgggttgccaaaagccaggtggtgattgaaaaaggcgaacttggccgccacaaacaaattaaaatcattaatccgcaacaaatcccgccagaaatcgcggcgttaattaattaggtatcctatgcaaaaagttgtcctcgcaaccggcaatgccggtaaagtgcgtgagctggcgtcgctgcttagcgacttcggtcttgatatcgtggcccaaacagacctcggcgtagattccgctgaagaaaccggcctgacctttatcgaaaacgcgattctgaaagcgcgccatgcggcaaaagtgaccggtttaccggcaattgccgacgactccggtctggcggtagatgcgctgggtggcgcgccgggtatttactccgcgcgttattccggtgaagacgcgaccgatcaaaagaatctgcaaaaactgctggaaacaatgaaagacgtaccggacgaccaacgtcaggcgcgtttccactgcgtgctggtatatctgcgtcacgcggaagatcccactccgctggtgtgccacggcagctggccgggcgtgattactcgtgaaccagcgggcactggtggctttggttatgatccaatcttcttcgtaccttccgaagggaaaactgctgccgaactgacccgcgaagaaaagagcgccatttcccaccgtggtcaggcgttgaaactgctgctggacgctttacgtaatggttaaattaccgccgctgagtctctacattcacatcccgtggtgcgtgcagaaatgcccgtactgcgatttcaactctcacgcgttgaaaggagaagtgccgcacgacgattatgttcagcatctgcttaacgatctgaacaacgatgtggcttacgctcagggccgtgaagtaaagacaatctttattggcggtggtacgccgagcctgctttccggcccggcgatgcaaacgctgctggacggcatacgtgcgcgtttgccgctggcagcggatgcagaaattacgatggaagcgaatcctggtacggttgaagccgatcgctttgttgattatcagcgtgctggtgtgaaccgcatctccattggcgtacagagttttagcgaagaaaagctgaaacgacttgggcgcattcatggcccgcaagaagcgaaacgagcggcaaatctggcgagcggtttagggttacgtagctttaacctcgatttgatgcatgggctaccggatcaatcactggaagaggcgcttggcgatctacgccaggctattgaactgaatccgccgcatctttcctggtatcaactgaccatcgaacccaatacgctgtttggctcgcgccctcctgtactgccggacgatgacgcgctgtgggacattttcgaacaggggcatcagttattaaccgcagcgggttatcagcaatatgaaacctccgcttacgccaaacccggttatcagtgccagcacaatctcaactactggcgctttggtgactacatcggtattggctgcggcgcgcatggcaaagtgaccttcctggatgggcgcattctgcgtaccaccaaaacgcgtcatccgcgtggttttatgcaggggcggtatctggaaagccagcgtgatgtcgaagccgcagataagccgtttgagttctttatgaatcgcttccgtttgctggaagccgcgccgcgcgtggagtttagccagtatactggcctttcagaagaggttattcgccctcagttagacgaggctattgctcagggttatctcacagaatgtgcggattactggcagataacggaacatgggaagttgtttttaaattcgctgctggagctttttctggctgagtaaatttgtattgccggatgcggcgtgcgtgtacgcagcatccggcaacaactcatgcgtcatcgcaaaaattacttaatcaccccattgcgccgcagttgttcggtatcttttttccagcgttcattagcctggttgatatcgtcaattttcatcaaaatcgcgacttttttactgtttatttctgaaactttcatcgttaacggatattgccctttttcgagcgttatccagtcatcctgcaatttacggctaagtttttgtgattgcagaaaagtctgtcgccgttgttcgttgatatcaaaatctcgtttctgctgaattggcacttcataacactcttcactctgtttatgacatgccgcaatcgccggttgataaacctctttgtcatatttaaccgcgaacgcctcactatcgttctgtttattaaaatcatcacgctgttggtgaatttttttaaaggcgtcttcgcgggtcatttgcttaccgtttgcatcttttccccaatatgcatccgctgctttctgcgccgccaccatttgcttatcaagcgcttttacatcctttttcagtgcaggaatcgagttattctggttattcaacgcagactcaagctgactaaagcgataattgaaatcttcgctattcacgatcagatatttattattcgttttgatatcgtcaaccacccgcccacgatcgctggctgccgcctgaaaagagtaaaagttcaccgaccagccagacgcgggcgttcctttactggttaacatcgccgagaatttcaccggtttatctttcgtccaggtctgttcgagcagctcgtaatctgccaactgaccgacccaggtatagagatcgtcactggaagagacatcgccttccgctgaccaggtggcctgattacccttagcatcaagattttttaaggtgatgacatcaagcttgagaatgccgtgatactgctttttgaattgatcttttaagatattttcagttggcggttcaccatctgcccagacattaccagtcatcaacataaacagcgccgtaccaacaatccattgctttttcacccgaaaaccctcgcgcggaataatttattccggtgattatcattagggtaataaaaattggcaatggacgtgagtctgaagtgaataagccccggcgcgataccggggcgaagtgattagtactgattgaagatctgctggatctgctgcggatctttagtttgcgtcagagccagttgcagcagaacgcgcgctttttgcgggttcaacatgccggaggcgacgaagccgtatttcgcatcatccacttcggcatcctgagtggtagcgcccgtcggtacgcgggaagaacgcactactgcagtgccgtttttcgcagcggttgcaagggtgtcaaatacggttttatacaggttgccgttacccacgccagcgctaacgatgccatcatagcccgcatctaccagtgctttagccggaagatcggatgcgttagcgtagttataaacaatgccgactttcggcagttcattcagcttagagacatcgaacggcgtgtcgctggtgtgcttacgtgccggggtacgttggtagtcaatcttaccgttgtgaatgtaacccagaggaccgtagttaacagacttgaaggtcgctacatcggtggtgttggttttggtgacatcacggccatcaagcacggtgtcgttcatcactaccagtacgccacgattagcggaggctttatcagctgcggtcactaccgcgttatacaggttgaatggaccgtctgcgctcatagacgtggacgggcgcattgcaccgaccatcaccaccggtttgtcgcatttcaccgtcaggtcgaggaagtaagcggtttcttccatcgtgtcggtaccgtgggtaatgacgaagccgtcagttttatcgcagtcggtgttaatttttttcgccagtgtcagccagacatcatcgttcatgtcctgggagccaatattcactacctgctcgcctttaacgttcgcaatgtccttcagttgcggcaccgcattaaccagattttctacgccaactttacccgctgtgtagttagatttggttgcggagtcaccaccaccggcaatggtcccgccggttgctaaaatggtgatattgggtaatgccaatgctgcaccactaaaacccataaccagtgcggcaagtgccgtctttttgaaaaactccatttcattcctccagttacgtgaacgctacgcattatcccttagctttgcatgggaaatttgacgttaaacaatttacaacgtgaatatattttggagatctacaaagttagaggcaggtaacaaaacgaagaattaaacggcataaaaaagtattatgccgtcttaaaatagaggattattttaaattcccgaccagggctttgcggctatcttccagagtcacaacgcggctacaaacatctttgccaaactgctggaaatctttttcctgctttttccactcggtttggattgaggattgcaggccgcccaggcttcccagcacgttctgtaatgggttaccgccgcttttcagcaccgctttcgcgcccatttcattaatgctgtcctgtaaaattccgcccattgcctgattcactaattgctggccttcggcacgaacctgatcaatggctttatagtgaaacgtcaggccatcgctgcgcgtttcgataatgcggttcatctgctctttcagctgcgcatcaagtttggtcagacggctgcgcattttgctgctttcgcccatctcctgaacgataattttatccagcgcaatacgagctttctcgacgcggcttttcgcgccttcatcaatccacggcagggtgctacgtagttcagcctgataatccttcgcctgctcgcgctgggcggcattcagggaatattgcttaccgttatacatcacgttgccgtctggcgtgatcaccagattgccgttttcgcccttcacctgcacggtttgcgggctgacaatcacatcgtcacgcggcgtgacgctgcactggtagtcggcgtgagcggtcattgccgtcactgaaagtgctgccgccagcagcattttgcgcatcatagtcttccctcaagaacaaatcaggccagcatttgctggccccagattgataacaaagtgcgcgttttccatgccggatgcggcgtaaacgccttatccggcctactcgatcgtgcatctttgtaggcctgataagcgtagcacatcaggcagttttgcatttgtcatcgcccgtatgctttcttagtcccaccaaacgtcgaaaagttcgctggtgcgtacctcttccagtttgcgttcttccagccacttacgcacaatcgcctgatgttcttcggtgcatttgccgatttcctgcatgcagatcagaccttcccaggccagataaccgctgccgtcaaaggccagtttgttcggttcgataacctcgttaataaagtcatcaacggttttatcaatctgttcttccgatgtaccttccgggaatcgccatgccaccgaaaatcctaattcctggaattcgtcgatgtgcatttttttacgcagacgacggctacggttctttgccattatttcaccctctcgaacattaagtcccatactccgtgaccaagacgatgaccacgttgttcaaatttcgtcaccggacgtgatgccggacgcggtacgtaatcattgctctctgacaggtttttataaccgtcaatagaagacatcacttcaagcatatgttccgcataaggttcccagtcggtcgccatatggaatatgccccccagctgcagtttgctttttaccagctcggcaaacggcacctgaacgatacggcgtttattatggcgcgctttgtgccacgggtcagggaaaaagagctgcaccatgcgcaatgaattgtcaggaatcattttatgcagcacttcaaccgcatcgtgacacatcacgcgcaggttgcttaagccctcttcatgcgcagaagacaggcacgcaccaacgcccggtgaatgcacttcaatgccgaggaagtcctgctcggggcgatctttagccattgccaccaacgacgcgcccatgccaaaaccaatctcaagcgtcaccggcgcttcacggccaaaaagcgcagggaaatccagcatatcttcgctgaactcaacgcccatcaccggccagtagttttccagcgcatgttcctggcctttggtcagtcgcccctggcggcgcacaaaactacggatacggcgcagcgggcggccgttttcatcaaattccggtgagatgacgtcgtttttcataaagatttagtcgcttgtgaaagtgttctgaaaacgggcattatccaaagttagttgccggatgcaagcatgataaggccgtggctgcggaaagttccggtttacaccctgccgtcgctgtgctgcaatcttgcccccaacaacagtgaattcggtgaccatgcaagcgtcgcaattttcagcccaggttctggactggtacgataaatacgggcggaaaacgctgccctggcaaattgacaagacgccctacaaagtatggctctcagaagtgatgttgcaacaaactcaggttgcgaccgttatcccctattttgaacgctttatggtgcgcttcccaacggtgaccgatctcgccaatgcgccgctcgacgaagttctccacttgtggaccgggcttggctattacgcccgagcgcgcaatctgcataaagcggcacaacaagtggcggccttacacggcggtaaattcccggaaacctttgaggaagttgcagcactgccgggcgtcgggcgttccaccgcaggcgcgattctctcgctttctctgggtaagcactttccgattctcgacggtaacgtcaaacgcgtgctggcgcgctgctatgctgtaagcggctggcccgggaaaaaagaggtcgagaataaactatggagtttgagcgagcaggtgacgcccgcggttggcgtggaacggtttaaccaggcgatgatggatttgggcgcgatgatttgtacgcgctctaagccgaaatgctcgctctgtccgctacaaaacggatgtattgccgccgccaacaatagctggtcgctttatccgggcaaaaaaccgaaacagacgctgccagagcgcaccggctactttttgctgttacagcacgaagatgaagtattgctggcgcagcgtccgccgagcggattgtggggcggtttatactgtttcccgcagtttgccgatgaagaaagtttgcggcagtggctggcgcaacgacagattgctgccgataacctgacgcagctgaccgcgtttcggcataccttcagccatttccacttagatattgtgcctatgtggcttcccgtgtcgtcattcaccggctgcatggatgaagacaatgcgctctggtataacttagcgcaaccgccgtcagttggcctggcggctcccgtggagcgtttgttacagcagttacgcactggcgcgccggtttagcgcgtgagtcgataaagaggatgatttatgagcagaacgattttttgtactttcctgcaacgtgaagcagaaggtcaggattttcagctgtaccccggcgaactgggaaaacgcatctataacgagatctccaaagaagcctgggcgcagtggcagcacaaacaaaccatgctgattaatgaaaagaaactcaacatgatgaatgccgagcaccgcaagctgctggagcaggagatggtcaacttcctgttcgagggtaaagaggtgcatatcgagggctttacgccggaagataaaaaataaaaacagtgccggagcacgcctccggcaacttgcataaaaacaaacacaacacgcacccggaatgatgaaaaaatatctcgcgctggctttgattgcgccgttgctcatctcctgttcgacgaccaaaaaaggcgatacctataacgaagcctgggtcaaagataccaacggttttgatattctgatggggcaatttgcccacaatattgagaacatctggggcttcaaagaggtggtgatcgccggtcctaaggactacgtgaaatacaccgatcaatatcagacccgcagccacatcaacttcgatgacggtacgattactatcgaaaccatcgccgggacagaacctgccgcgcatttgcgccgggcaataatcaaaacgttgctgatgggggacgatccgagttcggtcgatctctattccgacgttgatgatattacgatttcgaaagaacctttcctttacggtcaggtggtggacaacaccgggcagccgattcgctgggaaggtcgcgcgagcaacttcgcggattatctgctgaaaaaccgtctgaagagccgcagcaacgggctgcgtatcatctacagcgtcaccattaacatggtgccgaaccaccttgataaacgtgcgcacaaatatctcggcatggtccgccaggcatcacggaaatatggcgttgatgagtcgctgattctggcaattatgcagactgaatcttcctttaacccgtatgcggtcagccgttccgatgcgctgggattaatgcaggtggtacaacataccgccgggaaagatgtgttccgctcgcaggggaaatccggcacgccgagccgcagtttcttgtttgatcctgccagcaatattgataccggcaccgcgtatctggcgatgctgaacaacgtttatctcggcggaattgataacccaacatcgcggcgttatgccgtcatcaccgcctataacggcggcgcaggcagcgtgctacgagtcttttcgaatgataagattcaggctgccaatattattaacaccatgacgccgggcgatgtttatcagacgctgacgacccgccatccctctgcggaatctcgccgttatctttataaagtgaataccgcgcaaaaatcttaccgccgccgataattccactaaccgcccctgacgatgctcaggggtaaaaatgttatctacatcacaatttcgttttgcaaattgggaatgtttgcaattatttgccacaggtaacaaaaaaccagtccgcgaagttgatagaatcgcatcatctcgcacggtcaaatgtgctttttcaaacactcatccgcatcacgatgtgaggaaattaacatgaatcttaagctgcagctgaaaatcctctcttttctgcagttctgtctgtggggaagttggctgacgaccctcggctcctatatgtttgttaccctgaagtttgacggtgcttctatcggcgcagtttatagctcactgggtatcgccgcggtctttatgcctgcgctgctggggattgtggccgacaaatggttaagtgcgaaatgggtctatgccatttgccacaccattggcgctatcacgctgttcatggcggcagaggtcactacgccggaggcgatgttccttgtgatattgattaactcgtttgcttatatgccaacgcttgggttaatcaacaccatctcttactatcgcctgcaaaatgccgggatggatatcgttactgacttcccgccaatccgtatctggggcaccatcggctttatcatggcaatgtgggtggtgagcctgtccggcttcgaattaagccacatgcagctgtatattggcgcagcgctttccgccattctggttctgtttaccctgactctgccgcatattccggttgctaaacagcaagcgaatcagagctggacaaccctgctgggcctcgatgcattcgcgctgtttaaaaacaagcgtatggcaatcttcttcatcttctcaatgctgctgggcgcggaactgcagattaccaacatgttcggtaataccttcctgcacagctttgacaaagatccgatgtttgccagcagcttcatcgtgcagcatgcgtcaatcatcatgtcgatttcgcagatctctgaaaccctgttcattctgaccatcccgttcttcttaagccgctacggtattaagaacgtaatgatgatcagtattgtggcgtggatcctgcgttttgctctgtttgcttacggcgacccgactccgttcggtactgtactgctggtactgtcgatgatcgtttacggttgcgcattcgacttcttcaacatctctggttcggtgtttgtcgaaaaagaagttagcccggcaattcgcgccagcgcgcaggggatgttcctgatgatgaccaacggcttcggctgtatcctcggcggcatcgtgagcggtaaagtggttgagatgtacacccaaaacggcactaccgactggcagaccgtatggctgattttcgcaggttactccgtggtgctggccttcgcgttcatggcgatgttcaaatataaacacgttcgtgtcccgacaggtacacagacggttagccactaattacgcaaagaaaaacgggtcgccagaaggtgacccgtttttttattcttacttcaacacataaccgtacaaccgtttcatgccatccgcatcggtttcgctatagacaccttgcaactccggcgaaaatcccggcaacaaattcacgccttcttccagcgcaaggaaataacgttgaaccgccccaccccagacttccccgggtaccacgcaaagcacgccaggtggataaggcaacgccccttctgccgcaattcgcccttcggcatcacgaatccgcaccaactccacttcaccgcgaatataagcgctatgcgcatcctggggattcatcaccactgacgggaaactctgctggcggaacatcgctttttgtaggtctttgacgtcgaaactgacatacaaatcgtgcatctcctgacacaactggcgcagggtgtagtcgcgatagcgcaccggatatttgttataaacgctcggcaacacctcagccagcggcgaatcatcctcaatatgctgttcaaactgcgccagcatcgccaccagttgtgccagcttctcgtggctttccgccggagttaataagaacagaatggagttgagatcgcacttctccggcacaatgccgttctcacgcaggtagtgcgccagaatcgtcgccggaacgccaaagtcgctatattcgccggtttcggcatcgatacccggcgtggtgagtaacagcttgcacggatcaacaaaatactgatccgcggcatatccttcaaagccgtgccaattcgcccccggctcaaaactgaaaaaacggcggtcgctggctaacactgacgtcggataatcctgccacaatttgccatcaacaacgggcgggataaacgggcggaacagcttacagcgcgcaagaatagccttgcgcgactcaatacccaactcaacgcactcagcccacagccgacgcccactctccccttcatgaattttggcgttaacgtccagggcggcgaacagcggatagaacgggctggtagaagcatggagcataaaggcattattcaaccgcttatgcgggcaaaaacgcgcctgtccacggatatggttatcttttttatggatctgcgacgtctgtgagaatcccgcctgctgtttgtgcaccgactgagtcacaaagatccccggatcgttttcgttaagttctaacagcagcggcgagctatccgccatcatcgggataaactgttcgtaaccgacccacgcggaatcaaacagaatgtaatcacacagatgcccaacggtatcgatcacctgacgggcgttatagacagtgccgtcataggttcccagctgaataatcgccaggcgaaacgggcgcggcaggtcggctttttctggcgcaacgtcgcgaatttgctggcgcagatactcttcattaaaacagtgcgcatcaataccgccaatgaaaccaaacgggttacgtgaagcttccagatagaccggtgtcgcccccgcctgaatcaacgcgccatgatgattcgacttatggttgttacggtcgaagagcaccagatcgccacgcgttaacagcgcattcgtcaccactttattcgctgccgatgtgccgttcagcacaaaataggttttatcggcatgaaagactttggctgcaaatttctgcgcatctttcgccgatccttcatgaataagcagatcgcccaattttacgtcagcgttacacatatcggcgcgaaagatgttctcgccaaagaaatcgtaaaaatggcgtccggcaggatgctttttaaagaacgcaccatgttgatgtccagggcaagcaaaggtgctattacccatctcaacgtactgcgtcagcgtgtcataaaacggtggcagcaaattctcttcatactgacaggctgcggattccagctccagccactgctgctcgttgccgttgattaccgccgtaacgcccgcaggtaattcaacagcatgttcggaatacaaaaacaccggtagatgaaaaccggtgcgcttaagcaatgcaagaatgccactgcgactatccgcagcggtaatgacgactgccgcgacgtccgtaaaatcagtatctcccaacgccaccacgcggcgatgagtagaaagtcgggataccagttcactactggcggcaatattcattgatttcataagcgcaaaacccgtttaggggaagtaagaataccggacaaggaggaaaaccctgccccatgagatatgggtcaaactggtcaccagctccgaccgccagacatcagtaaaagcagaaacgctctgattttactgttgtcctgcagtgagcgtgcgttaacttcaccgcatgagcagtagcataaaaagagaagagtttcgcgcgaaacggcgataagcgagagaatgtaaggaggtggcgtgcatcgggcaaactccgtacagagaggagaaaattcgcgcaatcatggcacctttcgctaaagcgtgcaagccaggactttgcgaacaaacaagccatcgacggcgccaaaagttcataataagaaaatcaaacaatacagctaacaggaactcttgtggtcatcggcccttttatcaacgcaagtgcagtcttactgggtggcgttttcggcgcacttcttagccaacgcttaccggaacgtatccgcgtctccatgacatcaatttttggtctggcatcgctggggattggtattttactggtggtgaaatgcgccaaccttccggcgatggttttagcaaccttactcggagcattaatcggcgaaatttgtctgctggaaaaaggcgtcaatacagtggtcgccaaagcgcataatctgtttcaccactcgcgtaagaagccagcgcatgaatcttttattcagaattttgtcgcgattattgtcctgttttgcgccagcggcaccggaatcttcggggcgatgaacgaagggatgaccggcgatccgagtattttaatcgccaagtcatttcttgatttctttacggcgatgatcttcgcctgctcgctgggtattgcggtgtcggtgattagcattccattactgatcatccagttaacactggcgtgggctgccgcgctgatattaccgctgaccacaccgtcgatgatggcagacttcagcgccgtaggcggtttattgctgctggcaaccggattacgcatctgtggcattaaaatgttcccggtggtcaacatgcttccagcactccttctggcaatgccgctttccgccgcctggaccgcctggtttgcctgacaatgcgtgcaatagcggcaaagtgatgatagattgtgcagtctgcactaaattgaagaaatttgattgacgagacgaggcgaatcaggtttaatgcgccccgttgcccggatagctcagtcggtagagcaggggattgaaaatccccgtgtccttggttcgattccgagtccgggcaccaaattcatataaacggacctccacggaggtccgtttttcgtttcagaacgccacaatttaagcgttctgcctccaaatcaattctaccgaactcaaccagattccccccacatcaaccccattgtgtgggtataattgcgggtataccccagttcgacagaatttgtaccctctttaacgcattcagaaggctgaactatggcactgactgacgcaaaaatccgggctgcaaagcccactgacaaggcttataaactcactgacggggctggcatgttcctgctggtacatcctaatggttcccgttactggcgtctccgttatcgtattctgggtaaggagaaaaccctggcacttggtgtgtatccggaagtttctctctccgaagctcgtacaaaacgggatgaggcccgaaaactgatttcggagggggttgacccttgcgaacagaaaagagctaaaaaagtagtccctgatttacagctctcttttgaacatattgcacgacgctggcatgccagtaataaacaatgggcacaatcacacagcgataaagtactcaaaagcctcgagactcacgttttcccctttatcggcaaccgggatatcacaacactcagtaccccggatctgcttatccctgttcgtgctgcagaagttaaacaaatttatgaaatcgccagtcgtctgcagcaaagaatatctgctgtaatgcgttatgccgtacagtctggcatcatcagatataacccggctctggatatggctggtgcattgaccacggtaaaacgccagcatcgccctgctctggatctttcacgcctgcctgaacttctgtcgcgtattgacggttataaaggccagcctgtcacccgactggcagttatgctgaatttactggtttttattcgttccagtgaactcagatatgcccgctggtctgaaattgatattgacaatgccatgtggactattccagccgaacgcgaacctctgccaggcgtaaaattttcataccggggctccaagatgcgaacaccacatcttgtgccactcagccaacaggctgtagccatactggcagaacttcagacatgggcaggtgaaaatggtctgatctttacgggagcacacgacccacgtaaaccaatcagtgaaaataccgtaaataaggccctcagagtgatggggtatgacacaaccaaggaagtctgtggccatggattccgggcgatggcgtgcagtgcattgattgaatccggcttatggtcaagagatgcggttgaacgtcagatgagtcatcaggagcgcaacggagtacgtgccgcgtatattcataaagcagaacatctggaagaacgtcggcttatgctgcaatggtgggcagattttctggatgcaaacagggaggagtgtatcagtccgtttgaatatgcaaaagttaacaatccactgaaaaggtgactgaacgccatttacacacatgctcttcctcttaaggggaagagcacccgcctcaatcaatttcttttttatgccggcggaaccatcagccaggctgaggttctcattcaataactcaacgtcttaccacagaacagaattcactgtattatcatgggcaacgttaatcccggacaataaaaggacaccgatgccaggcatcacaatttttatagcctgcaggttatggtccatccttttttacaggttcagaatatgactggcaaattacgctttgaagtgaacgataaccagggctgtttcatatttccggaaacctggtttggctcgttgctggatgagtttgaagaactgattgatgcatacgatgcggatgaaatcagcgaaacaagttacatcaacaaactcaggcgccttgcccgacaggagaatgactttattgatgtacacgctcacttggcatacgtatttctggagcagaatgccccgcgtaaggcgctgaatgctgcccttaaagggctggcaattggcaatcgtcttatccctgaaggtttcagtggcagaatcatctggatacatcctgacaaccgaccttttcttcgtgccctctatgcggcaatcctggcaaatgcacatttacagcgtcatcaggatgccatcatgctcattgaaaaaatactggattacaatcccgaagataatcatggtgcacgctggctactgggaccggaactgttacgcactggcgctcatgaacaggcacgccatatactgcaggaacatgcagatgaattttcaccttactggtatgaactcggccttctgcattttcttaatggggaactggtaaaagctgcaactgcatttcgtcgcggctttgcggcaaatacttacatcgcagaaatactgtgcggaaatctgcatccatttccacttgctgtatggcataacttttcaggcggtccggatactgccgaagattattatgccacataccacccgttatgggggcaatatccggaagcattgctgtttgtaaactggctctataatcattcctctgtgctgcatgaacgggcagaaatcattaaatgcgccgaaatgctgatgcaggaagatgatttcgaaatatgcgaaagtattttaagacagcaggagaagttgcgtgaaagaattgatgagacgctttctgagaaaattgtacagaaatgcagaaatatgaatggtgaatatatctggccctggatattgccgttttcagcggcaggcatgaaacatactggcatacagtatcagtagatattgcattagtgtatcctgcacacaagtaataatttattcaccaataataacactgttaatgcccccttcccctggttgtcagccaggggttatcttctgaatatttcttttgaaaaggataacacagtaaattatttttatgaattatcccatggactcattaacaccctttcatgatgctttattgtcaaacacgttatggctgacatcaaaaaaaaccggatttcctctgccagcgggtaatcaccttcccggtgttttcggttggtctggttactcctgtctggttattagcaagataattgctataaacagtggaaaactcatcgtacataatctggtgatgaacattacgcttattttcccttgaccggaagaatcagaggctgtggtttcagactgtctgccagtacattcctctctccgttaaaaaccataacgggttcattatcttcgtctgtcagcagattgggtnnnnnnnnnnnnnnnnnnnnnnnnnnnnnnnnnnnnnnnnnnnnnnnnnnnnnnnnnnnnnnnnnnnnnnnnnnnnnnnnnnnnnnnnnnnnnnnnnnnnnnnnnnnnnnnnnnnnnnnnnnnnnnnnnnnnnnnnnnnnnnnnnnnnnnnnnnnnnnnnnnnnnnnnnnnnnnnnnnnnnnnnnnnnnnnnnnnnnnnnnnnnnnnnnnnnnnnnnnnnnnnnnnnnnnnnnnnnnnnnnnnnnnnnnnnnnnnnnnnnnnnnnnnnnnnnnnnnnnnnnnnnnnnnnnnnnnnnnnnnnnnnnnnnnnnnnnnnnnnnnnnnnnnnnnnnnnnnnnnnnnnnnnnnnnnnnnnnnnnnnnnnnnnnnnnnnnnnnnnnnnnnnnnnnnnnnnnnnnnnnnnnnnnnnnnnnnnnnnnnnnnnnnnnnnnnnnnnnnnnnnnnnnnnnnnnnnnnnnnnnnnntgaggtgtactggcaatagcggacacaaccatttgttctttttttaagcagccatctgatgatatttttccctgaaggctgccggggagatattccccagacgagagtgacgacgctgacgattgtagaaaatctcaatgtattcccgtattactgagatggcttcatcccggttattaaaacgatagtggctcaggctctcatttttcagcgttccccagaagctttccatcggagcgttgtcgtaacagttacctttacgcgacattgatgttttcagaccaaactgctcctgtatgacccggtaatcgtatgcgcagtactgtgaacctcgatcagagtggtggattagcccggcaggtgggcgctggctcctgagcgccataaacagggctttacctgtcagctcttttgtcatgcgctctcccatggcgtagccgacaatttcgcacgtataaacatctttgatgccagcgaggtacaaccatccctcctgtgtggcaacatacgtcaggtccgccacccagacctgatttggtgctgtaggagcgaacgtctggttcagcagatttggcgcaactggcagattgtggttcgagttcgtagtcgctctgaacttgcgtttctgcttacagcgtagccttagctccttacgaagacgtgccagtcggtcacgaccaacgatgatgccattctctgccagctccgtctggagccgccgggttccatatgtttcgcgagtgcggatatgtgccaccttaatctccagttttagccgctcatcactttgttttctgtctgagggttcatgctgtacccagttgtaataaccgctcctggatacaccaaatacctgacacatcgcttcaatgggaaattgttgtcgccattgttcgattaacgcgtatttttcagcgactcctgtgcaaaatacgcggttgnnnnnnnnnnnnnnnnnnnnnnnnnnnnnnnnnnnnnnannnnnnnnnnnnnnnnnnnnntnnnnnnnnnnnnnnnnnnnnnnnnnnnnnnnnnnnnnnnncnnnnnnnnnnnnnnnnnnnnnnnncnnnnnnnnnnannnnnnnnnnnnnnnnnnnnnnnnnnnnnnnnnnnnnnnnnnnnnnnnntnnnnnnnnnnnnnnnnnnnnnnnnnnnnnnnnnnnnnncnnnnnnnnnnnnnnnnnnnnnnnnnnnnnnnnnnnnnnnnctgtaagcgtacagcctgaaccgtctggtcagaatctgacgaattagacaaagtggtgtccaccaaataagtagtgggaaccaaagtgtcagatatgcagaaaaatgtgactcccggcaggcgaaaaggctgccctaattatcctcccgaatttaaacagctgctcgttgctgcctcctgtgaacccgggatatccatctcaaaacttgctcttgaaaatggcattaacgccaatctgttgttcaaatggcgacaacaatggcgcgagggaaagctgctattaccttcttcagagagcccccagctacttcctgtgactctcgatgcagctgccgaacagccagaatcgctcgcagaggacccggaaaccctcagtatcagctgtgaggtaacgttccggcacgggacgctccgcttcaatggcaatgtcagcgaaaagctcctgactctgctgatacaggaactgaagcgatgatcccgttaccttccgggaccaaaatttggctggttgccggtatcaccgatatgagaaatggcttcaacggcctggctgcgaaagtacaaacggcgctgaaagacgatcccatgtccggccatgttttcattttccggggccgcagcggcagtcaggttaaactgctgtggtccaccggtgacggactgtgcctcctgaccaaacggctggagcgtgggcgcttcgcctggccgtcagcccgtgatggcaaagtgttccttacgcaggcgcagctggcgatgctgctggaaggtatcgactggcgacagcccaagcggctgctgacctccctgaccatgctgtaaatctctttatcctggttgtcacagaataagcccggtaaaatacgggcttatgaacgacatctcttctgacgacatcttcctgctaaaacagcgcctggccgaacaggaagcgctgatccacgccctgcaggaaaagctgagcaaccgggagcgcgaaatagaccatctgcaggcgcagctggataaactccgccggatgaacttcggcagtcgttccgaaaaagtctcccgccgtatcgcacaaatggaagccgatctgaaccggcttcagaaagagagcgatacgctgactggtagggtgtatgacccggcagtacagcgtccgttgcgtcagacccgcacccgtaagccgttccctgaatcactaccccgtgacgaaaagcgactgttgcctgcggcgccgtgctgcccgaactgcggcggttcactgagctatctgggcgaggataccgccgaacagctggagttgatgcgtagcgccttccgggttatccggacggtacgggaaaaacatgcctgtactcagtgcgatgccatcgtgcaggcacctgcaccttcgcggcccatcgagcggggtatcgccggaccggggctgctggcccgcgtgctgacctcgaagtatgcagagcacaccccgctgtattgccagtcagaaatatacggccggcaaggtgtggagctgagccgttcactgctgtcgggctgggtggatgcatgctgccggctgctgtctccgctggaagaggcgcttcatggctatgtcatgactgacggcaaactccatgccgatgataccccggtccaggtactgctgccgggtaataagaagacgaagaccgggcggttgtgggcgtatgttcgtgatgaccgcaatgccgggtcagcgttggcacctgcagtgtggttcgcttacagcccggacagaaaaggcatccatccgcagactcatcttgcttgcttcagcggtgtgctgcaagcggatgcgtacgccgggttcaacgagctgtatcgcaatggtgggataacggaagctgcctgctgggctcatgcccgccgaaagatccacgatgtgcacgtccgcatcccgtcagcactgacggaagaagccctagagcagatcggtcagttgtacgccatagaggcggatataaggggaatgccggcagagcagcggcttgctgaacgtcagcgaaaaacgaaaccgctgttgaaatccctggaaagctggttgcgtgaaaagatgaagaccctgttcttcggctctggccatggtggtgagcggggagcgctactgtacagcctgatcgggacgtgcaaactgaatgacgtggatccagaaagctaccttcgccatgtgcctggcgtcatagcagactggccggtcaaccgggtcagcgaactgcttccgtggcgcatagcactgccagctgaataacacatccccgtcaatacggccctcgctgtacgcttacaacacatctgcaagaatcattattctcttgcctgaagctatccagcatcctcagatatttcgcactttatgagctggcatcagaaaaatgtgccagtaactttttattaatgacttcaaacagttcctgttcatcatgggtcagataatcccagatttctttcagatacatgctttgtgcaagagtgagcctctgaataaaaaacataccttcagatgtcagactgatttttttagcacggcgatcctccctgctatccgtcctttttacatatccggctttttctaaaaaatctgtaatgcgggtaatattagttctggtaaactgaagtttctggcttatctctgaaggtgacagacaatggttctccgctgcgaataatgtggtgagaaccatatatgctgagtgatttattccatacacccccagaaattcagatatattatcctgcattcttttatttgtgcgaatacagagctgcatcaacaaatgttcccgaaagggatatgcggggtctttgtttttttggtgtctgattattttttctaatgtgtctgtgttattcatttcattattctccatattactgaaacacactgtctgtgtacaagcgcgcatcagtcatccggtaaacatcgactttccactacaatttattcctacctgatttctgtatgacagagtagtcccgacaggcagacggataaattcccgcaggtaaaagaacataaatgctggctgctgacaagtctgtgaaaaaggattattgtagtggttcacaaaatcaggacaccggaataacctgtttccncttttnttcatntaagcaaggnggtaaaccatcgttnttcgnnngnggtcganaaacgttntnggnaatnanncnannttnttnnnnnnnttttntnttnannnantnccnnnnnnnttnnnnnnnnnnnncnncnnntttnnnnannnnnnnnnnntncnnnccnnncnnnncnngnnnnnncnnnnnntnnngntnnnnnnnnnnantnnnnnnnnnnnnnnnntnnnnnnnnnnnnnnnnnttnccnnnnngnnggnntnnnnnnnnnnncnnncnnncnnnnnncnnnnnnnnnnnnnnaanggnnnnnnnnngnnnnnnannnnncccnnnnnnnncnnnnnnnnntnnncnnannnnnnnnnnnnnnnnnnnnnnnngnnnnnnnnnnnnnnnnnaaannnnnnnnnnnngnnnnnnntnnncccnnnnnnnncccnnnnnnnnnccnntnnnnnnnnnnnnnnnnnnnnnnnnnnnnnnnnnnnnnnnnnnnnnnnnnnnnnnnnnnnnnnnttttnnnnnnnnnnnnaannnnnnnnnnnnnnnnnncnnnnnnnnnnnnnnnnnnnnnnnnnnnnnnnnnnnnnnnnnnnnnnnnnnnnnntttnnnnnnnnnnnnnnnnnnnnnnnnnnnnnnnnnnnnnnnnnnnnnnnnnnnnttnnnnnnnnnnnnnnnnnnnnnnnnnnnnnnnnnnnnnnnnnnntnnnnnnnnnnnnnnnnnccnnnnnnnnnnnnnnnnnnnnnnnnnnnnnnnnnnnnnnnnnnnnnnnnnnnnnnnnnnaannnnnnnnnnnnnnnnnnnnnnnnnnnnnnnnnnnnnnnnnnnnnnnnnnnnnnnnaannnnnnnnnnnnnnnnnnnnnnnnnnnnnnnnnnnnnnnnnnnnnnnnnnnnnnnnnnnnnnnnnnnnnnnnnnnnnnnnnnnnnnnnnnnnnnnnnnnnnnnnnnnnnnnnnnnnnnnnnnnttnnnnnnnnnnnnnnnnnnnnnnnnnnnnnnnnnnnncccnnnnnnnnnnnnnnnnnnnnnnnnnnnnnnnnnnnnnnnnnnnnnnnnannnnnnnnnnnnnnnnnnnnttttnnnnnnnnnnnnnnnnnncccccnnnnnnnnnnnnnnnnnnnnnnnnnnnnnnnnnnnnnnnnnnnnnnnnnnnnnnnnnnnnnnnnnnnnnnnnnnnnnnnnnntnnnnnnnnnnnnnnnnnnnnnnnnnnnnnnnnnnnnnnnnnnnnnnnnnnnnnnnnnnnngcatcaacaacagttccgttaaaggttactctaccctgcccctgtggagtagttagagcagcatttacaccaaaagacaccactgccatagctaccgcaccggcaataaccgacttaatcataaataacaacctctttttcattactgaacacaccagagatatctggcaatttaaaatgacccgattacctttaataaccagatcaatacaaataatattctcgtattttcagggcaggttatttatcgacagaatactgatataacctgtctgctttctgacaagggcttctttttttatcttccagaaactccggaatgccataatttagtcaaatgccgatgactcatctgtataataaggtgcaagccttgctgcaagagcattcagccgtataagtctccccagtgttgtactgaaatacccattattcatctggtatttctcgcagacctccttacgggagtgcccacctaccagatagtccttcatagccagaatgaccctgtcactgtgaatagaagaaatacctatcagtaaaaaaaatgcatttcagacatagagccgagcaacagcacgctctcgcgtatattcagcaaaaacgcatttcctgaccgactgatgacttcatgatgcgccatgtttcccccttctgtcgggcccctggatatatgcttccggcccggaaatactcttcacgcaataagttaaatttagttttttatgttgtaaatattgatttaaacgatcttttaacccacaaaacaaaattaaaccagaataaaattctaacaacaagaatacactcagataaaaacatcatggtgaattgaatttacagcataaaagatcgtctaaatgcatttttacggactttcttttcacagaaaaataacacacaaaatgtgatacacatcaaataaagccaacaaaaagcaaattcactaaattgcacaaataaagcaaacacagagaataaaaatacctttccgttgataacagagagcatgatttttattattcgaagaaactttgttacagtgagatgagtgaatatatgaagaatgaaatactggaatttctgaacaggcataatggagggaaaaccgcagaaattgcggaggcgctggcggtaacggattatcaggcacgctattacctgttattactggaaaaagaaggtgtggttcagcgctctccattaaggcgaggcatggcaacatactggcttctgaaaggagagaagcaggcggggcagaactgttcttccacaacttaataactcaatctgtgggcatgcttcactgaaacagataaaagttacatcagagtgcagattcaattttgcagcattcatcacaaaatagaaatttagtattttatgtcagaatacttcacatgataataaaaacctgtctggatttactgcatggccagacattacaaaatacaaacgccataaacttcattcagccttcttgctgtccggtaacggaggctgctttttcgttacacctttccccggcagcatcagtagcagtaatttatagattctacgaactgagactgtctgtccggggagaacgtacacagcccgacacaatgtaccagtcaataatatccggtttctgattccctgcctgacagaccactctctggcaactttgtattcagttcatctactactggagacagatttataaaatccaactccacgatctttgaccgtccgcatcccctactctctgtgctgcggtcatcggttaattccagcgtccgtccgttacgatcagatattactgaacctccccgggtttcctggagagtgttttatctgtgaactcaggctgccagatcattgtttccgatggaagcataataagctttttctgcttctgccggaggagtatggcccagccttcccagcaatcatcgattgttataccagtccacccacgtgagtgtggccagttccacttctgcacggtttttccagctcttacggtgtattacctccgctttgtaaagaccattgatgctctccgccatcgcgttgtcatacgagtcgcctgtactccctgttgatgccagcagttttgcttcttttaatcgctccatataggccagtgacacatactgagagcctttatcgctgtgatggatggtgccggacggacggcgggcccacaacgcctgctccagcgcatccagcacgaatgtcgtttccatagacgatgagacccaccaccccacgatgtatccggcaaacacatcaatgatgaacgccacatagacgaagccctgccatgtgctgacgtaagtaaaatcagccacccacagctggtcaggacgttctgccacgaactgacggtttacgcggtcacctgcagcaacggttttccggctgacggtagtgcggacctttttaccccggagaacaccggcaagtcccataaccgccatgaggcgcgccactgtacatctggccaccctgattccttcccgtaacaactgacgccagactttacgcacaccgtacacctgatgattttcatcgtatacgcgctgtatctctctcttcagccagtcatcgcgctgacaacgggcactgcgtttatcaggatgatgccgctgctgctgacaatggtaatacgttgacggggcaatatgctgttcactgcataccggtccgaccccgtactgctcacgcagcttatccagcagtggcattattttttccagaggcggtcgaactccgccttcgcaaaataagcggaagcctggcgaaggatatcgttactgcggcgcagttcacgattttcacgttccagctctttcagacgctgacgttcagcggtggtgagcccaccatcaccgcccccggtatcccgctcatgctggcgaacccagacacgcagagtctctggcgtacagccaatctttggagctatggaacaaattgccgcccattgtgagtcatattcgtcctgactttccagaaccatacgaactgcccgttgacggacttcgggggaaaaacgtgtatttttagtcatcctgtttacctctttctcagggaatttagtctccaggattcccggggcggttcacagtaatcatgccgggtctggctggctaacaccccattataaggggtacgaataaagtaacggggcttcacgcagggatggacagattgctctgatatacagccgacgacgtcccgctgcaacatcatcacgcagatgcttcattttcagatttgggacctccttttgatttctcgtttaacttttgctgttaccagactttaatctattttaacaattcaagaattttttataaaatgctcaaagatgaaagcgttactgaaccaaccagcttggctgatgttttctatagataaaaagatcatcagcaaaaactgatagcctgaatcacctttactaccaatcatgtatgaagaaaacacgcacaaacaattgacaatgattatcatttgcattaaaaggattatgtagtatttttatttcatgaggaactatacccgccagcaatctgagtagcgaaagctgttcatccccaatatttttgctggcgggttcttttttctactgcccttctcctcagagggagcattccattctttttttcattaatggcgagggggcgggacaaaaagccggttctttatccctaaataacagcatgatttcagtccatgcaaaatctgatttaccagctcacataataacctgatgatacatgggttttccctgatcatggtgggaaggctcagaacgccatattcagtttcccgtagtggaacatcacgcccagcttaaagcgctcccgatttcggtatcccctggcttttatcctcagtagcctgatcttactgttaagcgcctccgcgtttccgtttgagacacggtgtcgcatggcattcaggatcccgtaaagcctttttcctatcgttttcgcggcgtttttcatcataggaacgtcactgttggccgccagagccagccatctctcccagtcattacgtctttcctcactccatggcctgttccagatatcctttgccagctctttcagcgcccagcactggcttgtcagcttcatctgtgcacgcagccatatcagcttttcctgcctggatttggtcatccatttatcgctgtactgccacaggaagcgggtcccctttgcctgacgccaactttcaacagggaggtgcggatgttcattctgacgggttttatcaaccacttcgccaagttgctttgctacatggaagcggtcgaaggcgattttctcaaccgcacagggtaagtggatacgcgctgctcttatatagcctgcattcatgtccattgagagcgttttgatagccagcaactgcccgtcagtaagcgtgcgaagatagccggcgaggctctctgtgccacgatcgtccgttaaggccagcgcacgaccatcgcgatcggagatcaccgttatataacgatgtccttttttaaaggcgacctcatccacattgtcagcaccagtgatataagacggatagcaaagcgcacgcgctgtttgtcaccgtgaaaaacgacggtgcgacggcaaaagccaataacaacgagagcgtcgtgcgcattcctctgcactgacagttgattcttagaacgtagaggcctggattgctgccaggcttttattgcactaccagctacggctaaaagataagcgtcccgggaagtacatagcgcttacaaaatatccgacatgaagcatactggaaacgaggcgtattgttattgttgttcatattggcttccgtggcggaaatatcagggggtagctacatatcccccatgcagccaaggcaacgatgttaactctcgtcacctgttcctttcgacagagccaacctcgcagagggccagatcttacaacttcacctcagtgatacaaaacacaaaaatacaaaacaatttgatacaaatcatccctcttattttaaataaatccatcttgcaagcctaccaatcagaaggtagcatgtgtagtatcgcaaacataaagagaaattgctcatgaattatgttatctgcactaccattgtcgcccttggtctcattctgacaggctacgcaactgctgcagatgaaattaatcgtcaggacgttgttggtttgatgccgtcagactatatttctgttggtaatctatatacaccagaagaggtggcaactgcgcttaaagacaaagcggagcaggcaggaggttctcatttccgaatcacttcattgggaggaaaaaataaacttgatggaactgccattatctatcgctaaaatatgtataatagtccctttaatacataacaggtaaagccgtgtctacttatgagaatatacttcgcataacggatactctgatccagcaacgcggatttttggggttcagttacgcagatctggaaaaagaaattggtatcagaaaagccagtattcatcaccatttcccgaggaaaactgatcttggtatagcctactgccaatacaaaacagaagtatttgatagacttaatataactctccataatgtttcttcaggtgtacaacgtctcaggacatatcttgatgcatttgctggttgtgctgaaagaggggaaatgtgcggtatttatgccatgctatccgacagccatcagttttctcctgaattacaggaggctgtaagtcaactggcacatcaggagatacagatgattaaagatattatcacctccgggcagaatagtggagagttcaaaacagttcttcttccggatgagctcgccgttatagtctgttctacactaaagggggcactgatgttaaatcgacttccaccacatgatatctattcaggaaccgttaacgctttaattaaaatgcttgatacccgtacttaatcctttttagtgcatataattttccacccggagaatgaaatgaaaaaatttattaatgtttacattaaatcagattatgacatagttattcttcgcctgtctgttattataatatttatgctcttcgggacctataaatggtttgattttgaagtgatggccctcaagcccctgatttctcccacgtggctgaatatcctgtacattatgtttggtgttcatggggggagctatttcctcggcatagtagaaactatcacttttctagcactgagtatcggcttcttcaggcctgctgctggcatactgggagatattatcgttattgttacaggtttagtcacactaagtctgttaccacaactgggaaaagttgacagttttgtcatcaaagatgtgctgctgttaggtgctggtagtgtcctgctgaaatatgatttgaaaaattatttaaatatcaaaaactgatttttcacttcggtgatgaacgtttgcgtattttcatggaaagagattacctaatccccctcgttctccttcatgttaatacgcaacgttatggaaaacaaaaataccctgagtaaaaaggtccgtaggcaggcgagtacttttattttccgctagttttactttcccatcgaaggccccatacatcactacgcccacgaaacaaccgacgaaataacgcaacttggctggatacaacgtattgccacagatatgcagcaactgcgtcagtccggaatgtcagtcatctccggggatgttggggtctcaggcacactgaccggccccccgtgttgtttccgggtactgtttttgatttatgcaacaaagtattgcagcgtcgaatatgagctatggccagatttttgttaatcgtggttgttgcaacatgtaaggcgaatgaccacactattctggcacgctcgtaatcacgctgaaattccgcttcctgtgctgccgtgaagagttccgaccaggacatacggcgaagtgtatgtctgtcagtaatatccgtcatgagctctcagcttcctccttcgtatttccgtcagaaacacaaacgccccgcagagaaaattcgccaacattctcctttttaatggcgtgcaatgcatcgcgacaggcccgttcggtatgaaatgcctggctgtgcaccgccagtgtgggctgccgggcatcaccggaagagacattaaagggagatgaaagccagaaaatcagtagccacatgcgtcacacctcgtcctttttatgcgggtatctggccagaatattgagcgcctgtaatggagcttcatgcatttcacggatacaacgggcatcggtgatgttttccctgtaatgcgtggtttccagcatcatatgatgcatatgcagcatccgggccagggctgcacggagttcttcaatatgttgttcatgggaatgctgacggggtggtatccggcagagagggataacctccacatcatccgggtgcgcgcgaagccacgcgtcagtgactgtaatgtcgtcagtgtaaaaccatgtgccggatgtcccgttggccagaaaacgcattttccaggcttctggggtggcggttgtgctgttatctttcatggtgccaccactcattcaacaggcttaatgctgtccaggcgcagtctgctcagactgtcgtggctgccacagcggcgtcctgtacttttgctgtagcactcctgccccctgatacaccatgccgttggcgtttcgtagaggctgacacgtcgggttttatctttactggctagaagcccggtgtgagtttttgtctttttcatcggtggggtacaaacgcagaaattttgttgtcatcagtttttgcctgcagaggcctgaaaagacagcgttttcagaccctgttcaggttagtgaatattcttacctggcctttcggcaatatcaatcccctgaagttgcatggatatcccatgcccattgagcatctggctgtccatggaatggataccgcatgtcaccatcaggttgtaacaaagcgtactcagcatggcgagcgcctcttctgaggatttacaatgtgtgttcataagggccagaaactgctcaacaacatccgggttgatgctggtactgtgtatttcatccttcattatgtgtccttgttttttattattttgcatttcagaaaataacacgatgcatgtaacccagaaaaccgatatgtgcacgcgtagtcactttctggcagattccggtctctgaaacaaaatacgaggtggcatgaagcggattgtggcggacagggaaagtgatttgattccggggaaggcgctgtgcagcagtcttatccggcagtttaaaggggtggacggagaccaatgaggcactggagcagattcagtgcagaggtgacatgatttatcaaacttaattgtgacaaaatggcgattgagaaggtgcaattgacttatccggattcggtcgtggcgaggtggtgaccctgcattctgctaaccgggttatgagccaggagtcagcgatagacaaagggacttatctgaccgggcccccggaaaaatggcgggagagaatgataccttcctgctgacgagaccggactttgagatgacgagcgatagtgcggcagtgatgtacagcctgatcggtagctgcaaaacttaacggaatcgagccggaaacgtggctacgccacgtgatcagtgtaatcaacacctggcctgccaaccgcatgaaagagttgttgccctggaacgtcactctctctgtacactaatttttaccccacgtccttcacggtgcgcttacactctggacaagtatgtaaatgataagttaaaaataatccgtgcatttcctgtgacgatattagttgttggtaacgaaatctcattagcggatcggaaatgcacttaacctaatacgttgccactgttccgccaggagttacagtggcaacgtattctaccgtcagtgatagcgttttgttattatcagaactgatagttcagcgacatccagtaatttcgctcaggtatcacatatcctgttgttgatgatcccgtctggaagtaatcaccggcatacagcgtactcttaccggcactgtacaggctcacgtcactgtaatccttgttgagcaggttattcaccgcagcattcagcgtcagggcatccgtcatcttccacgacagacctgcattcaccaccgtccaggctttcaggtattctcctttctcatcatacactttcttctgtacagcgctcagtgacgaataattctgggtgaaacgtggtgttttcccgcgataacgggcacccagccatgatgccacctcttcggtgatctgccagttcagtttcgcattcaccatgtgttcaggggtataactcagcggcgcacctttgttatcaccatcacgttgttcacttcgggtccaggtgtaattcagtgacagcgtgacatcctctgaccacagcggcaatgtgccggcaaattccacaccatgcaaccgggcctttccgctgtttacatagctattggtgttatcatttacggaataagagacaatcttgttggagaagtcagtcataaaacctgtgacattggcattcagaccggcggggttatcgtaatacaccccagcctcataactgacgctctcttccggcttcaggtcggggttaccaagtagatttgtttttccctgcccggatacaccactaatccctttatgtagctgccccattctgggtgccttatatcccgtggtcacaccgcctttcagcgtccaggcatctgccacatcccagaccagatatgcacgcggactgaagtgtcccccgaattgctcatgatgttcatagcggctgcccacagtcagcgcaagtgcatccgtgagatgccactcatcctcagcaaataccgaccagcttttctgccggaaagtttcacctgtgctggcaaggacaactccgtctttcatggacgagctctgaaactcgccccccaccgtaaccagatgagattctcccagaggggtaagcagtaatgaattcaggataaggttcgattccttaagctcccgcggctgaccggcaagcccccatttgtcgcgcttcagtacactgcgtacgagctcacgacctttattttctgtctcgttccagttcagatacgatttccatgttccgaaggtgaaagtatgatcatagccagctgaaattttgtttcgctcatagcgcagggtccggtcatatccccccgtcagactccccagttgcccatcccggttatcataacgctgccgggtggtatccatatcaaaccagagcacatcctgcgccgacgccttccagtcaagacgtgcaccaagattataattctgtgactccgtgggataaggaatacgcgtggctgctgtatcgctcagtgatgtgaccgatgagccctgacgctgttgtgtgctaccgcgtacctgcaggctgacagaatcatccacaaggggaccactgctccagaaattaaactggctgctgttaccccatttgttgctttcctgcagattcagccctgcattgacggaagagagccatttgtctgcattctttctggtaatgatattcaccacaccgcccatcgcatcagagccatacagtgtggacatcggccccctgataacctcaatacgctcaatggcggccagagggggcatgaacccggtattcatggcagaaaaaccgttgggagtcacgtcactgcttccgccctgacgaacaccatcaatcagtatcagcgtgtaactggctggcattcctcggatgctgatttccagcccaccggttttacccgtaccactttcaacatccacaccctctactgatctcagagcctccgccagatcgtggtactggctggactgcaattcctcctggctaatcacagaaacactggcggctgcgttagtcagctttttctcatagccggatgcagagacaatcatcacatcctctgcagcagctatgctgctggctgaaaatccgagacagggaatgactacggaagccagagtggttattcgcatattactaatctccgatcatgttaaccggcaagacaatacataaatacaaacaataatgagaataatttatatttgccttttacaaaaaataaagattattgacaaaactaaatataaataacgactgcctcggcatgccagttaacagctatccgtatggcgtgttcggttttgcgaataaaaaatggttactgtagaagcggatttccaccacatgtcaaccatgaatggtcagtggtgcgagacgactgggatgatttggtcgatgacttcttccggcgaatactgatagaaacattgaaatattgtaagagaaagcgttcaaaattctgtggcacgtgaaaaattctacagcgtcatcaccttattcagtcgaccttcaaaataaacgtttaacagagacaatcaccatttggattgtccgctgaggaggcgaacgatttcctagacagctttatcatgtcagcccacattgttggcgctgacaatggatttgcccctatatttccagacacctgttatcacttaacccatcactggcccactgccgcagatattcccgtggcgagcgataacccagcgcactatgcggatgccattcgttataatgctcgaacgcctctgcaaggttctttgctgccgttaacccgtctggtttgggcatgatacttatgtagtcacgctttatcgttttcacgaagctctctgctattccgttactctccggactccgcactgccgtgttcttcggttcaagtcccaacatcctggcgaactgacgtgtttcattcgcccggtagcatgaaccattatccgtcagccactccactggagacgccggaagctcgctgccaaagcggcgttccactgctcccagcatgacgtcctgtactgtttcactgtcgaagccacccgttgtgaccgcccagtgcagtgcctcacggtcacagcagtccagcgcgaacgtgacccgcagtttttctccgttatcacagcggaactcaaacccgtcagagcaccatcgctgattactttctttcacagccactctgccggtatgtgcccgtttcgatggcggtacagcgggttttcgctcaagcaacagcgcattctggcgcatggtccggtaaacacgtttggcattgatcgcaggcataccatcaagttctgtttgtctgcgaagcagcgcccatacccgacgataaccatatgtgggtagctctccgataacatggtgtatacggcgaagcacatccgtatcatccgtgtgacggctgcggcggccgtccttccagtcatcggctcgtctgagaatgacgtgcaactgcgcacgcgacacccggagacaacggctgacgaagcttactccccatccccgggcaataagggcgcgtgcgctatccacttttttgctcgcccatattcaacggcttctttaaggagttcattttccatcgtttttttgccgagcagacgctggagttctttaatctgcttcatggcggcagcaagttcagaggcaggaacgacctgttctccggcagccacagcagtaagacttccctcctggtattgcttacgccagagaaatagctggctggctgccacaccatgttgccgggcaacaagggagaccgtcattcccggttcaaagctctgctgaacgatagcgatcttttcctgtgtagtacgccgtctgcgtttctccggccctaagacatcaatcatctgttctccaatgactagtctaaaaactagtattaagactatcacttatttaagtgatattggttgtctggagattcagggggccagtctannnnnnnnttccagacaatcctgataatacgcttatgaacattacaacacgctcatgcggaacctggatgggggaaggaacggtgaagctgttagcgaatgactggcgtttgtataaacgccggtcatgatgaatgatatttcagaatatacctcgggctaaaataccgggacagagatcaggcatgattaatctgcagcatttttaataacagaagtactgagcttactttacctttgatgatggaatagttatttccgtcggtactcatttttccctgaaataatgtcacggatgtttcttcctgctgatcctgcaggcgcagtcgtaaggtcatatttttaatgagctgagatccgggtggcaaggggtatttgctgtcagatactgggcgactgagtctgatgtggcgcgtatacagcccgttttcgtacagggtggcctctgttatggtgtcagtgaccagcatgtgggagacaatgctgtattcttttttaaagcacccaccagaaacggtgattgtaatgataatggtcttctcgatcgagatgtaaatacccgtttcgttatactgtccgtatcggaaccatgagaactcagttgcattccagccatgatccagaatatgtgcatttttttgcctgatagtttctttttttattcgctcatgtttaaggcataacaggcagataaataatgtcagaaaaagaaagctaataatgagagcaagagcgatatagtctgtcacagggtaatacatattctctccggtagaagaagggccgcaaacgcggcccgggctgttatcagaaagagtaacggaagttggcgttgatcgcgttatccacgttgtatttaccaaatgccgatttctcaaactcaagaccgaagcgaagattatcgcgaatttcagcgttgagaccaacattcatgagcatacgaccgtctttttcacctttgatacgtttctcaccggacgcatcacgcagtacggtttcaccgttggcaaacaggtcaaactggtagccaaggccggcgcgggctgtgactttccagtccttacccgagaaggatttacccacatcaacaccggtacgcccaatcagcggattaaagtccttatccttcatggtgaggttcattccctggtccttccaggagaactgtttcccggatacagcaccgtaaacaagttccgcctgcggctcaatccatgcagagtcagttacatggtaacggtaaccgacttccgcaccggcataccaggagtgggagctgtagtctctggtgccaaggccggcgaaagttgcggtatactcgttgtcatggtgaacgtacttaccgatgaggtcgatatatgctccggactcaaacatggcagaggcatagagaccggcacccacagacttcgtttcaccactgaaggcatcactgcctgcatggctgtcggtataggtcatggtcaccccggtgaagaggtcaaggccatcgagttcatgtttgttatccgcaccgacctgaacgtgggtgtagttgtcactgaatccaccgccggcagacccggttccgctcatgattcgggcccatgcaccggactcaccgttaatgtcacgcagatcacccatacgtttgttaaggttgttgacctcagcaaggaaggctttatagccgcctgacatcagtaatgttgcctttttagccgcatcggcgttggccacagatttatagccgatcagagtccatgttgctttgtctgtatcgttcttttgctcgataaccggtgttacatcactgaagccaatactccgagtcgtagctttaaagacatctactgcagttccttttggtgcgctgaccagatcgatattcagtccgttgctgtttccatttttctcaatgaagtcgactaacagaaggttgtttttaccagacaacgatttattgacaacaagctgatctgcttgggccagatttgcacgcagcacaaatgcactgtcatctatagtaaggttgtccactgtaagggttgtaaacttcccattatcaccagtaaaacgcaccatactgtcttttgtttctagacgattaattgatgactggctatttagatgccagatcgcattattcatgctaactgtagctttgggggctgttattgcgcctcgataggcggtatcaaagccatacaaaagagtctctgcccatgcctgataagcagacgatatagtcggtgtttcagtttcaggctgtcccagagtaatggttgctgcatcatcagcataaatatttccggtgacagatgccatatttctggcaatgaaatttgcatttccaccactcagcctgaatccatcagcagcgtagtggagacccggcgttacagttttactattctgttcagggattcccatcatagtcagctcaccggagatatcaataccttttgttgtgaacatggaattttgtgctataacttttgctcctttatctatacttataggagtattattcagaaaggttgcaccattaagtgtaactacagcttgatcacctatggctatttgactgttatgtgcagtgatgccacctgtaaatttagtttctcctatggatagattagtactgatagtttgtttgaagtcaaaaccattattagtaatatttttccctgcaagattatcaatgtaagcatttttatcgccgattgtgatagctgatttatttgctgatatatttccttcaacattggcattgcgtgatattgaaaagtcagcattgttcaggtgtaatgtatcaaatttaaacaccccggttttccagtctggctgatcaaatgaggtctgctgattattacttttgtgatcagaattgaactttttattatatgaactctctgtttctttcaaaacggtgacccagtccgttccacaaagaaataccagggagcaatgattcgctgtgcttctgaatattgcatgctctgttgcatggccttgcatggtaagactggcattactgacttcaacatcattttttgtgttgacactaccatccagaattaattttgcattagttttcttatcctgagaattaatattgtgcgttagttttatattgccatttatgttcccatgatatatgtaggagtcttcgttattgattgccagaacggcttctttcgttgtatctgagttagttattgttgttccatcgtcagtggcggcaattctagtaaaagtctgattgtgtccatttaaatctagcgtgccaccacgtttagtaaaaaatatccccgcatattgatcattgccaagggaattatctttatttagtattaccttaccatttccgcttgcaaggtatatattgttaaatgttccttcttcattaagaataacatttccttcacctatctttatatttgccccctgttttttttgaacattcagagtaccggggcctattttgtgtaaaacatcatcactggaatacaatgcattccagtttacaatgctttcttttccgatatcaattcctgctcctttaaatgtaaatccctgaccgtttatgttatattcatggccttcgtcaaagataataccaccgctaccaaaatccaaattatccttaaacaggacatttcccccatttgtgaacacaatatctttgtctttagttattttttcttgagtaccagtggtatctgcattgttttggtgtaatgttatatctgtgttttttatggttacattattgccattcagatttattttatgactataggtatcttttaactcactaaccagtttatcattgtattttgttatccatgtcagttggtcaccattaacgctggcaataccatgggttgttccgactaatacccatttttctagtttgttatcatataagtatgctccagagccgctgtctccgaatatttcaagattacgaaatgttttatcatttttataaatcatcatgccgtatgagtcccattgggtgacctcaaatagactagcacttaacagatcatggctatatgctgaatttgttgagattttggattcaccattaataaatgatgttcctccagagccagcacgaaaacctatgattttttttgaaccgtcagaagtgactataccgtagcgttctaatgcatcagaatatgttgtagggttggtctctgccggggtggcacctactgtttccacaacaaatttatttaacctctgaatctcaaaatcattggaatttcttctgtcaacaaccttgtaagaagactgagcgtaaacctgagtttctgcggcctgagggttctttttgttatgtgcaacagtaacactataagaacctcctattgcggtagctgcgccactcgctgctgcaccagaaaaatccggaattgagagattatggaaagagaatttatctccgttttttaaagtgattgttacgtctgttgctccgggctggaaaatacctttattttgtgcaagatcaagatagtctctcgcccatacatttgatatatcaatatttgctgcatttactgtaccggcaacagccagagacaacattgttgctacaagttttcggtttgttttaccagaaactcttttcgctaattcagaaacagcaatgagtccgccagtggcagcactatatttaagggagtatattttattcatatattctctcaactcatttattgaatgaacaaagtattaagaattaaaattattagtaacggttggttactaacagcttgctaaaagtaacagttctatattgtaaatatgtgacaatgttctcattaatgatgagagattatgtgaatcaatactaattgatcgttaattgatcgttttttgtttttttttgcccaatgtggggaggggtaatgtttaatatttcgatatgatcgaatatctgttcgcatggaacatcgttcagtgattcacgacgaattagcgatcgaccacgatgcgattttgcagtgtgccgaagaagttctccatcgctgcgttattcagaccgtttcctttgtgcggcatattttgtgctactccatggggctttaacttagcctatagcctgccattcgatattgccaaccctgatccgtatgtagctacggggcatcctccgggccgggcactgacaatgcatcgtgcaccatcgtattaacaatctccattaccggactttatgacaggcgcaggagaaaatctcccggttaaactgaacggagaaccagcgacaggtacctctttttaccctgtagcaagtactctataacatactcccccatttttcgttggccttcattgcagcaaagttccggctcaggatattgggcgcagatcatcctctcaggaatttcaggatctgccagacggtgctgagacgacgcttacttgtaaggttagttttcagacggacaatgaaatgaggatatgcgataaatttcagtcaaagatccataaaacagacataatgttattcagtggtgaacagtccattccggagacggaatatcttgttaaggctgtatattatactggctgtaaacaacatggccaccaaggaccatgttgtttacagcatacccttgttgcaaaagcatccccgtcagaacagcacagagtagttcagaccaaaggttcggcccctgcctttgtagtcgtacagtgacgctgggccgtaacccgggctgtagtacagtggtgcacgctgcccccagacagtggtgtagtcacggtcgaagaggttttcaatgctgaagctgagtgtacccaccggaagctgataactgccgagcagatccacggtggtatagccatcgaccttgtagccctgcgcgtcgctcacgtcaaaggaggtggtgctctgcacgcgcagactccacgggtccggtgcccagccaatgtaggctgtcgcttttgatgggcttgctgtcttcacatcgtatttctgccaggtaccgttcactttcgactcagttttcagcacgttgaagttcactccggtactccagtcagtatcaggaatcaggtagtccaccgcaccttccacgccgtaaatacggcgtttgtcgtccaccacgctgatggtcagatctttattcgccaccacgctcttatcagaaatcgaatagtaggccgcgatttgggtgcgcagattattgccagtaaagcgccagcccagctcataagaatcgactttcacgccttccagcttgctgtcgctgacgttcacactctttgttagaggaagatggccgttcactgcagcaccatagatgccgcgaccatagtatttacccgggtccggcagctccacgccctgggagaagttgagccatgcctgctggcgttcggtgatgtgcatcagcagaccggcgttgaacaggaagttgtcgtaatcgactgagccgccaggaatggcgtcggcggatgtagccttcccggcggcaatctgccgttgctgcgcgtagccgatgaaatcatcaatcttgttttcagtgtactgatagcgtacgccaccgttgagggtaaagagattattgatgtcatagtctgattgcaggaaggccgccaggttggtgatgtcatacgacggatagcgcccggtggtgtaaatcttcttgttgttcagccctccggaagcgcttgcctgagccaggtcgaagaacatctggttggaggtaaagcgctcatgatcagcatccagcccccaggtgatttgccagccgtccatcggtttgctgttcagagtcagtttcatgccgtactggtcggtgtcctgctgtgacgaagagaaagccgtcacctgtttgttcgcatttaccgtcgggaacgggtagaatcgcaacgactcatcgcggtagtaaacctgaccgaccagctcctgtcccagaaaagcgctgtcagagtactgcaggctgatcaaatgccgctcagtgccgggaatacggtcggaattcagcccgttactgacgaatggcgtgctggtccctctgatggcagagaagcctttcccgagattaagcccgtaatcgtcgtcgccctggcttttatagtactgtgtgatcaactgaagctgccgggattcatcgatgttcagcgtaccagttcccatgatgtccagccgatcggagtactgcaggccggtctgggtgttatcaagcaaggtggcatcgccgttaccgtcaaaccagccgccaaatttctgatatgccacggaaagacgtccggagatatgctcatttccgccggagacagctccggcaatgcgttcatcgtgatctttactgctgctaaagccacttttggtgccagcctcaaactccatcatggtttccggctggccttttttggtcacgatgttgatcaggccaccggtactgccgccgccgtacagggacgtcgcaccggagatcacttcaatatggtcgatattaaaaggatctatagagtccagttgtcggctgtcggtacgtgaagagttgagacgcacgccgtcaaccagcacgaccagcgggcggccacgcacattcataccgtagttggtgcggctccggctgctgacgtcaaggccagggatcagctgagccagtgcgtctttaagctctttgccgccctgaatctgctgttccagttcggcgttttcgataacccaggtggtttgcgccatctccgctacggtgcgattgctgcggttggcagacaccacgaacgtttcatcatcggtttgttgagcgactgctggcgccatcatggtaagaagcagtgggttgagagcccaaagcgtatactttttgcttatcatcattattcctccatacgggcggaaaaaatcagcccaaagatgctgtgtagcgagttaaagaagcagcctccggctgcgttttccctaggtgccgctgcgccactgaatcagggcgggcggcatactgagatcgaataaatcacgtcccattacgcgattaagaatacgtgcagatctccatgccatcaggctgagctggggttcggcgatgccatgggtttgcatactggcgttgaccacgaagatgttgttctctttcgggccactccattccagagtgaagtcatcacgcactttaaaggtgttcttatcgtgcatggtgatcaggggcatcagtgagggaagtatttgtggcaacgcagaacggtaacctgtggcgaaaatcaccacatcactttccaggctctccctgccctgatccagatgatgctccatcagcaacttccagccaggaccactactttccagagttgttaccgagcggctgggtagcagacggatatttcttggttttctcagaacttcaaaacggtggtacaactcacgataaatggtcagtaaagaatcggcagtgatgccatccgatgtcattttctgctcatccagtaactgatggcgaatatcttcctccagtccggagaagcctgaaatatattcaggtgtaaaatactcatcagcaaaagcagcctcatccagtgcgttaaaattattacgccgggagacccagtttatttccgccgcttctccccattccccgcgtaatgcattaaggaacaggtctgcaccactctgtcctccaccaaccacggttatccgttttccactaaggtccggccgacgaagattcatttcactggcatggaaacaggattgtgtcatatgcttcacacagggtggtaaataaggttgttttcctgtaccaaggcagatattgcgggcaaaatattctccctggctggtttgcaccagaaacaatcgacgttttttatcgaaatcaatgttttcaacggtatgactgaaatacaggttattcatatcttcagcagcccagcggaggtagtcagaaaactcttcacgggatactgtacgtagtctgcttgtaaggaagcgatagaactttttgtgcttcaccagatagttaacaaaactgtagggatttgtaggtgcaacagcactgaccagatctttcagaaagacggtctgcatatgacaatccggtaccagcatacccggatgccaggaaaaatgaggatgttcatcaaagaagagacagtccagttcttcgatctgatgtgacaacgcagcaatgctgagattaaatggccctgtccctacaccaataaaatcgacactttttttcatgattcatattcctgagttaccagccacagcggattttgcagatcctcaaggtaattcggcagcatgcggctgccgccatccagatcaggccaggtcagttttaccgggttcagcaccacgcgaatgatttgtggcctgaaaagtgagaaaagcgcaaaacgctctgacatttgtggatgttttttcatgtaatcactcaacactgctgccagcagttgataaaatcgcctttcaggtacgccaagacgaaccatcagtggcgaaataaaacgcagtactgtcacgaagtgacccgtctgcaaatcatggattaagtagtccgcactcaggcgggatgtaacatcacgaacctcctgaggcaaagagtccatttcggggaactcttctttcaccagtcgcatatcgccctggaagtctttcagcagaacacgctgtggaaccccctctttcatggcgagagttatattttgtccatgtgcaataagcgcgacaccgtagcggcaaagcaggtgatacagaggaaccacgaccacccggaacagttgcgtaagccaggtttcagcgtccagcccggagcggtctatatatgcgcctgccagcggctgattgttttcgtcgcactccatcagtgttgccatcagaaccggactttcatccggtttcagccagcggcacggattctcccgccagataacaccaagcatttcctggtagcgatagggagcccgggcaagcgcggcatagccttcatgggagacatagcctgcagccggttcaccaagtatcactgcgccgctttgcactagggtggcgtcggtcgcaaaaacctgttgtagccagcgtgaagccagtggtccggcagcgatgtatctgccagggatcccccggtagcatgaggtgttgtagatggtcagcggcagcttgatatccagcccgccccggcgactggcgttggtcagggtacgcagcgactgctgggcgagccactggtcgccaaactcgccgagagacaccatcctgccttcggcaaaatcagcgatgaagtcggtagcgattttttgctgccactgccacggatgtaccggcagcggcagccagttgtgatccagtccgttttcctgccagacctgactgaagcgtgtaaactcctgcggatccattgcggcagtcaacaactgctgaatatccagatcgttatcgcagcgccagatcatatgttcacgttttaccgccagccagtgcagtctgaaggtgttggtatactctggcgcatatcgttccagcgcctctttgccccagccacggcgacctttattaaaaacgaatttaggatgaccgctcagcaggcattgcagacgatcggcatcaagattaatcaggtcactggcactcagtccgcgacgggccttcagcagttgcaggtcgcccagtagcgtggcatacaaatcctgcatatgctctgcaacagtggcatcactcattgacagcaccggctttagctgcatcagcagcgtctgcgccagtactggttcgtccgtgcagcgcaacgtttgggcatcaatccacagccagccccagataccacgttcagcgatgaagcgccattgtgctcccggcaggttaatgcagtagtggtcatcgccctgagattccgcgtggaaaacctgctcatactccatctcagacaacatttttgccaccagccgacggttaacaaaatcccagtccttgtgattcattacagaccgacctccgtgaagaagtgatgacgatccgccatcaccatgcgcgagcgcttatgtgggaagtcgaactctttaattgtccggtatcccgcaggctcaagatggcggaacaggcgcaggttatcggtgcgtggctccagtactgtgcgctgcgtacggggctcatccagcagcaggtaatgtgtcagcccgcgcagccagctttgcacatagtgggccccgcgccattgctgttcaccaaccagcagatgcaggccacggtcaaagggctgccacgaatagtgacgaccaatgcggtcttccgccgcccagtagatttcgaaatagctgaatggccgatcgtcgaagcacccaatcagcgggaatgcatgtttaccggtgagctggcgctccagataggcggtctgtacctccagtgagccactttgctcccagaaatactcaacgcgcggatcattcatccagcgggtgaaacgttctgcatcagaaacgggatcggcaatgcggaaactcagcatcctgcgaatacgtggatcgtaacggcggtaaacctcaccctgtggacggggtgggcgctgcgggaaataaatctcacgctctgcatcaaaaaccatttcaccggaggcccggtttgccggtgaactcaaccataacggtaactgccagaaggcagtacgatggataatgtcgctttttacctgcccaaaaagcgtcagcgcctgtggctcctcacgccattcggcccaggggagagccactgctgacagttgtggagcggcgataaatatctgatccagcgcatcgcacagccaccctgtcggcagctccccgggacagtgcaacaccgcgctattgtccagtccccagccaagattcaggggcttgtcgagtttttcacagcgcagtccatatctgctgtgaataatgtttgcctcagacattcagacctcctgagcctgcagcgggttagcgaaatcgaaatagatcaccgaagggtcaacaatggtgttctcgttatgatcgttcagataacagaaaaagttaccttttacgttccagtacggactttccagcacgtagttgagacaggttttatgagtcacctgatcacgcacttcagccagcgatgctcgtacacgagccatcagattcgattcgctgtccagcccggcagcccccagcgcagcggtcacagcaaaagtggagttaaccagcaggtaataagggaaatagcgcagcaactgctcatgggtgaaaatattttccgcctgcgcctcgccaatagaatcgagccagtctgtcgcgtgaggcataaaagcgctgccctgacagtcacggtaaataaatccgaccggcagatccccaagcatctggacaagaatattttgctgatgcgccagcagcaccaggccgtaatccgcttcagccgtaaacagcggctttagcacttgctgacagtatgcatcgacccatgcatgggcggcctgttgcacagtgataccgaggcgatcgctcaggcgttttaccgccgaaaccagcagcgaatcaccgccatcaggtgcggcctgagtcagggagaccagtacgttagtctggcttttcggctgatccaccagcagattttcacgcagggcaaacagactttcctgcatgatgttgccgttaagatcgcgcagcccggcccagccatcctcctgcattacccggaaagtcgggaagcggacctgtagcatctgccagccgtcggtttgagccaggcgtgccaggcgcatcccacgcttcacttctttcacggacagagtacggatggagttggtcagccgtacgctcagggagaacttgatcatatcgcggctggtggcacagtagagggaacgggaagaggtggtcggcagccacgacgtgccggcctcacctaagtctttaatcagccctttagcaacaagtgcctggcaccacccctgctgcaaaagatattccccctgccacgggtgcaacgggaacagccattggttgtcacttaattcgttgagtaactgaggcgcattctctgcggcaaatcgcgtcagccgctgttgaaggttgagatgcaaactttcaccggcgatttgcgttttatccaccgaaaaccaccgcagtgggaagtggggtgccatatcaggcaggtagcgttcagcctcccgccggttaaacggttcatgagacttaggcgcagggtggaaagcgtgtcctgtcagcagcgcctgctcagcctcgccaaaattcaacgctttttcacgcagagcggcccagtcatgacgggcatcaattgcctgttgcgtatggacatggctttccagcacgcgctggtggaaagtttcgcagaggggaacgggcagaaacagttgatggcgtagcttatcaataataagccgggagagagtggtaaagtcgacaggataactgcctgatgccgtgaccagacgtgcaggaaatgcaaagcggtgatgctgggttggggagaaataagccactctgaaatggagcgatttctgctcatccagcgggatgagcaattcgtctggcgggtattctgtcagtttccagtctgtggtttcacgaatcagtgcattcaggaagcactgcgcagccacatctgtggctggtttttcagagggcagggtcatagtcaaacagctcccacacagcaaaataataacaattatgtcaataatgattctcattatcaataataaatgttattgtcagataaattaattttacaaataaacacaattaatacatggagttgaaacattataatgtcaccagggatcgaagatacgccccaaaaaccactgtcctgctggccacttgcgttcagtgccgggcttctcggtatcggacagaacggtctgctggttgtgctccctgttctggtcatacagacaaatctgagtctgtctgtatgggctgccctgctgatgcttggctcaatgctgtttctgccatcgtccccgtgctggggaaagcaaatttcccgtactggcagtaaacctgtggtgttgtgggctctgggaggatatggcataagctttaccctgctagggctgggaagcgtgctgatggctaccagcgccataacaacagcggtgggactgggaatattaatcatcgcccggatcgcctacgggctgaccgtgtcggcaatggtgccagcctgtcaggtctgggcattgcagagagctggagaagggaatcgcatggccgctctggcaaccatcagctccggcctgagttgcggcaggctattcgggccgctgtgcgcggcagcaatgctggccattcatcctctggcgccactggggctgctgatggcagccccagtgctggcgctgctgatgctgctgcggttgcccggcacaccaccacagcccacaccggagtgcaagagcgtcagtctgaagcgggattgtctgccttatctgctttgcgcaatattactggctgcggcggtgagcatgatgcagcttggactttcgcctgcccttactcgccagttcgccacggataccaccgccattagccaacaggtggcctggctgttgggtctgtccgcagtagctgcgcttatcgcgcagttcggggtactccgtccgcagcgcctgactccggtggccctgctcctgagtgccggagtgttgatgagtggtggtctggctatcatgctctccgaacagctatggttgttttacccgggctgtgcagtgctgtcatttggagcagctctggcaacacccgcttatcaacttctactgaatgataagctggctgatggcgcaggcgcgggctggctcgctaccagtcacacacttggctatggactgtgcgctttgctggtgccgctggtatcgaaaacaggtgtcgcaatcgcgctgattatggcagcattatttgcaactatattatttaccattgtgtctgtatttatctggcattaccgtactatcaaataaagatatgatcatcaccttactggagtaaatcagaggatatgagagaggacctgcgtctgatgaaaacatgtcaggcagtgttctggcttgctgcccccgccactccgtcatgtctctcagagaatcatgtcagagctgtagatatatcctgaacttgtctacaaataatttcttattttttgcgcataacattcagcaataactccccttctggccattgaattaaaatgtgtacttctctgtgacgttgtccagcttaattctgtcctccatgatgaccccagatacccgacagataaatcatcggcatcttcttctggctcattagttaattcatgtcggttactatcctgaaagctgagaaaatgtatttcatcatcagtccgttgtctgtaatgtccatatataaaatcatattctttttgataagattccttccagtaccaggttgtatcaccacacaaccatggaactctttctgacgaattaccaacacactgagatgagtattcagataactcagacctgaaagaagttaccatctgataaaacaagtcaggatgcttttcataatctggtgacataagatcaaactccccctgcatccagcagacagatagcagtttattctttctgttatattccagagctaccttaacccgggctactaagtcctcatagagtgctgttccggtgccccaccgcattgcatcagctgttgcccctgtatcaggtacatacataccttcagctccaacagtaaaggcggcacctcctctgcaacaaggaaccagtaatatccctgcttgctcaggtatgtatggcagtaactttttagctatatgcaatccctgtccgacacaaccatattcccctttatgcaaatcagcagccggatggtgatatccactcatatcctgaacatcatgcaggcagtgatctgccggaataatctcattgaatttacactcttttcctcctggtgtgattgtttttcgacgagccagttgttttacacgggactcgggtttgtcgagtgtatctggcaggggaataccttcaccgtaggccataccattagactgtcctgcgagggctatcacataccagaaacctattttttcattaaaatcatgatgatacatcattccccctttacataatagatttaattaaatattttcattattaaaagaaagtgttaaattaaaaactcatttgctctaatccatataaatcaatatatgtccgacaacaaaaaaaccgtgttacccgggctaacaacgaccagaaagcccattgttacaaaaaaactttcagaaatcgttgccgaagagcttgaaagaatgatccgccaggaggagataagggaaggtgaatacctgccttctgaacgtgaacttatggcattctttggcgttggaagaccatctgtcagagaggctttatcatctctcagacataaagggctaatccggtataacaagggagaaaaagccagtgtctgccgtccatcaccagaaaccatcattaatgggttatcaggcattgttaaagattttttatctacagctgatggcatcaaggattttgaaagactacgcatcttttttgaaaccaaccttgtaagatatgcagcaaaaaatgcaacgcctgaggatattcacaggcttgagaaggtgctcagtatccatcataactcactgagaacccccgaagtgtatgctcaatatgatattgaatttcatagtatacttgctgatatacctgacaataaagtattaaaaacaatacactcagcattttctgaatggctgataatggccaaacctctggaaaagaataaaatgacatatgaaaataacaaaaaaacccatcagcagcatattgaaatacttacggccataaaagagcatgattgtgataaagctgaacagctaatgtataatcacctttataaacgaattgaagcatcatagttactcgacgcttcaccaggtagtcaccataaatattatttaaatccatgagaatacatccagtccataaacagttttatccatcctccaacagaaagatctgtggcccactgaatactaaaaccatgccctcctttctcatagagatgcatttcagcagaaacgcctttctctattaggccacggtacatgagcagactgttttcaattgacacaagatcatcatcacaacaatggagtaaaaacacaggaggaaaacatgatgtgacattaagatccgcactatattgtattatattttctgaggtactattgtcccccagtaattgcttcctggagcctggatgtgtcacatcatctttcattgatattacaggataaattaacccgacaaaatcgggaatagcgaaaatctcttgttctttactgtcagaagaacgtttgaaatcacaaatctgattcacaaacgttgaggcgatatgccccccagcagaaaatcctaatacaccaatacgatgacgctgtagatgccatttatcagcattcttacgaatataaagcattgcagatattgcatcaataaaagttttgtttatattttctccctcaactggcgatggtaatctgtaactaagaacaaataatgtatagccctgagataaaaactctggagcaagagctgtaccttccttatctaacataacagcctggtagccccccccgggaataatcaatattcctgttccatttggtttatctggtaaaaaaataattaactgaggagcataaatatctgtcaatacacgatcaagttcaaattccccgttatgttcaggatcctgataaatacggcctgaaagagatttactctcagatattgtctcacttgacaagtcaacaatagttgatttattaaacaagcttaacatcatttcatttaaagatctatctttattcattataaaccccattaaaataactcaggtgactgaacaactaatacagtcacctgcattacagttatttaacaatctttatttgtttgtcattttttttcagataaataacatctgaaacagctttaccatcttttttctccccccccagaatgagcatccccccctgccagggcaggcttacaccataagcaagtccttccggcaaagaaccaacttttttccagtcattttttattagctgatatatctcttttgaataggctttatccagtcctttatgagaccagtattcaccattgctatacttttctgccgcccccgggaaatatgcaccaccggccagaaagatatttccatcaataacagaggcatatgctcctgacaccccctcgggtgaagctactggtggaagttcagaccatttaattcgatcatgcgaaagctcccccgtccaggatctaacagaacgaagccccggttttctctcccctcccagtatataaatttgctgttctgcaaaaatcaccgatgaaccagcagttcccggaaatggagtcgttcccaggttcttccactggttttttgacgggtcataagaaattatatgattatttaaaaaataatcatcagcaggtttactaaaataatccctgttgactttctctgtcagcgcggaattcccttttgataactcgacatctgaaaagtatccattaaaaatattctcatttacaccaccagtagataccgcatgaccattatggataaaagaaacatgaccggcaagagatacagggggacgggtcatcaatttttcccatttatctttagcaatatcataggaatagacatctttttgtaaggttatgactccacttttatcttttccaattcctccaaatacatagatcttaccatcaataatagtagctgttgcctgctctctgggaactgtcggccattgcgctatcttagtccattttttttcactctggtttgtatctatcatataccagttatttcccagacttcctagtcctatatatattttaccattctcgatccctcctacaccatatttaaatggttcaggaatttccggtaaagctccggctaccgacgttccaataaacaagcagaagggaagatatataaagtttttcactttcattgtaatcaccttttaaaaattaatcagaacaccgacacggtaactattttcatgtttattatctttccccttatacaccccttgtttatccaagtaatcatattctatatatggggtgaacaccggtgacattttatattgcagaacaaatgcattttcagttgctgtttttttatgattcccatatttgaaattattaaccttcgtatataccgtggtctgccatgcaaacaaccatgaatcattaattttgtatgtcacataaccatcaaactgatgctgatcattacgcgccctgttgccatctaaatccgtctgtcggaaagctttccagtcatagcgatagcgtaaggccagattaagatctggcgttgcctgatacgaaattttcagataagggttatactgacttcctgctgacatccattgtgtctgaatccctgggattagagcccatttgtcatctattttatatgttttatttatatctattttattataattgagtgcaaacaattcattttcattgttgtgaattgtattccaggtgtttgactcaaaacttgcccaccaaccattattccacccctgactaacctgaatcaacgtttcataagcgtgactggcgcttctgtatcccccacgtagattaagagttaatgcctgagagcacaaaggtaaaccaagaagaattacagttaatagtggataatattttttcataaatgcctcatcattaaatatatttatcacttgtaatttgatttctcaatgaaacttatgttccgcaagccattccagaagcaggctttgccatttttctatcggatatccattttttccggatacaccaaatccatgacctcccttatcaaaaaaatgagcttctgcatgatgtcccttatcccgaatagagttaaaatatctcagagaatgaataactggaacatccttatcatctgttgcatgcacaataaagactggtggcatatactctgtaacactattttcaagactggctgaatattcactttcacctgcatccagaagacgtttccggcatccctgatgagcaatactcctgtcaagagatataactggatatatcagagccatccagtcaggacgcacagaagtctcttcctcataatggagatgagtaatatatccagcaagatgaccacctgccgaaaaccccatacatccaacactcttaaatgttctctccgacattccggcccagtaagaaataaagttcagggcattcttcgcatctgcaaaggaataataaccattaacggagggcattctgtaagaaagaataaatgccgtatatccctgacctgctatccatctgccaacatcaagtccctctctttcataaacaatcctcctgtatccacctccaggtataatcagcacactatgttgattagatacaacaggctcaacaactgtaataaggggcacaatacctgtatatattatgccatcgccagtattctcaaatagcgaactgtcagttatgtaacgctcataattatcaagagaatatatattctccctgtaatgaatcatttttttattccctgatagcatccgttattcttctgcaacattcttttttcttgctccataaaaaggttttccatcgacagtatcatattcaagcgcagcttctggatggatccatctctgtacacgtgatggcatatcaaaaccaataaggacaagaacaacaaatgttaagataaaagcaagagaacacattgctgtaccaagacttgtatgagacgcaacaactgcaccaagaataggcgcacatgctccaccaagtgaacctacattataaataaaccccagtcctgccgcacgctgctccacattaaaataaccactgattattttcggcaccagagcaccaatcccctgaccaaaaacctgctgagtaaagattagaaggccaagtaaccatacatagtcccggtccacaagaaaaacggggataataacaagctgaccgataagaagtgatataacatatgcttttcgggttccaagccagtcccccataaaaccacctatacaacttccagctgcagagccaaaacctgccagcataaatatgagagcaacagtttctggtgaatactgcatatcaaccttaagccatgtaggaagaaaagcctgcagtggccatccgtagaggaaacagaacataaccacaagcatcaacataatgcctgttggccatcttttccccataccctgatatataaaactgataaaaacagccgcacagcacaatgccataactgtgattaaagcagcgtttgcagtgacgcctgaaaaacaaacatatagacatgcaaatgcaatacaagacagaagaatatttatgtatttattcttttctctgtacagaatatccaccattgttctgacgggtttattctcttgttgccttttttgccagtcatcagactccggaagattcttgcgaagataaaaagcaaataatattggaagcatgccgacaaagaaaagagaacgccagccccatagtggtactacaatgctataaacctgtgcagctaaacctcccccaatagaaaatccagaaattaaaaaaccacttgccttgtttctgagatgaacaggccagctttcgataacatatgttacacttgagccatattcacctgccataccaagcccaataacaatgcgagcaataaacatcactgcatatccaggagccagaccacaggcaagggttccgagagagaatagcactatacttaaaaccattgccatcctgcgccccatcttgtccgataaagcgccaatagcaagccccccaaaccatcgagaaataaaagcagcggaaataaggcttgccgcttctattgtcgtcaagccgaattcatgctgaacctctgtaagaaccagagatatcagaacgaaatcaaaaccatcaagtaaataacctgtccatgccgcaccgaatatcttccactgtctgggtgaaagatgcttataccaaacctgctttttctgaatacaggagtccatattaaacctcacaataatagcggatttataatacactggagtattactttaagtaatacaatcccggtcccaaagagttgcaccaataagaccagagtcacttctgaaatatgccggaaacagcattacattacaaatttcagaatatatggaaagatgtttcgacactttctgaacatacccatcagcaagtccaacacttcctccgacaacaacaacctgacaatcaagcagtaattttaaacttactattaattcagcaatagtactggcagaacgctctgtcaaaaattctgcttccttatatccctgtctcgctaattcaaaaatatatttggtgctatatcctgcaagtttattttttgctgcccccatgatggcccgaccagatgaaaccgcttcaacgcatccccgacgaccacatccacattctgtatccgttactccggacaatatatgcccaacatgtccggctaatccagaaacacctgttaataattttctgttaactacaattccccctccaacccccgtagaaacggttataaaaaccatatcacaaatttctttcggcaaaactgtatattctgcccatgcggctgcctgggcatcatttatcacacttccatttaaaccagttatatcttccattatatttttcagaggatactctttcagccctccaagattgtctggattcagagctgtcaatactccattattaataatccctgttgatgctactgcaaatcgctccgctgttcccttcatttcagaaaccagtagacgtaaagcccctgtcatttcgtcaggacatctttcatgaggtgttgatatctgttttttcagcaaaaatgaaccgtcatcagatatcaacgccgctgaaattttcgttcctcctatatcaacagccagtgttatcattcattttcacctatataacaatcttgcaattattcagattattttcatttttttgtttctgtcatgttcttcgaacagtcgctctgcaagttttgataatacatccagattcttttcctttaccggagaaaaaggacttctgcatacaggagtatttataatccccatatagtaaagaagagtttttatacctgccaggacaccactctgaataagagtgtcaataacctggttacaggctacttgcatttccttcgccttaatcacatcattgtttttgactgcttcaaatatttcaagataacgccaccccattatattatatgtactaccgattcccccatctgcacctgcaattaaccctgatgcaaatatttcatcgtaaccattatataacacaagctctggatgattccttttgatttgttccatctggaataaatcaccggatgtctgttttaatgcacaaaccctgggtattgtgacaagctcatttatctgatctaaagaaaaacgcactccgctaagagccggtatattataaactaccatcggaagtccatctgcagaatcaataatcttcctgtaatggatacaatgctcttcaaatgaaaaaggataataaaatggagtaacagcagatatagcatgatatccgtatttttttgcagcttttgcaagtacctcgctttctgccgtactgattccgcccacatgcgctataagtgtcagtcttccatctgattcatcggctactgtttcaagaattttttctcgctctgcaacattctgaagaaatgcttctccagtagagcctccaacatacaatcccttaatattttgttcgatattaaaacggatcagttttcgaagactctccatatcgatttgctgggattggtcataaggagtgggtaatgctgatatgacccctttaaattcacattgcatttttaatcaccttcacttaactgcataatgggatacctagtacaccatcaagtacaaagattatccaacagaaaagaagcacaatgtgaagattatcaaaaaaaaaccatcagaaagctgtcatgccgctcagttaaggatcggttgatcgatccagtgtccagttactattctctgcgtaaccctctgcgactatcttgccccggaactgattacccacagccctgaagagtccgacactgtcacgctacgcaaacggcgtcttcctctggaaatgatggcctggtgaattatcagtatggcccatgagcgtaaggaaccttcaccagattgtgaaccggctggacacatgctgccaggtagtcgcccctttgtcgcgccgtgatccatgcccagcagggccaggaagcggggccgtacgccacgtgttcacgtaaacagcgcagccctgacataacaccacgctgtatccgctctggtgcaatatgaacctgctgaccatcgatggcgtgttctaactaacacaggacacgccagaacacgacataaagcttcactcgccagatacatggtaagcgtaaactgaccgccgtatgtagccattaagccagtattggtaacgtaggtgcccaccttttcatcaactagtggacacctgttatggaacagaaaatattatccgcagaaccccgcagaacattttcaaatgagtttaaacttcaaatggttaaactggcttcacaactaggagcctctgttgcccgtattgccagggaacacgatatcaatgataacctcctgttcaaatggctcaggctctggcagaacgaagggcgtatatcgcggcgtcttccggtaacaacctcttctgacgctggcgttgaattattacctgttgagataacgcctgatgagcagaaagagcctatggcggctcttactccgcttttatccactccttcacaaagcacagtcagtgccagttcctgtaaagttgagttccgccacggtaacatgacgctggaaaatccttcaccagagctgctcacggtgttgatccgtgaactgaccgggagggggcgatgatctcgctcccatcagacactcgaatctcgctggttgccggcgttactgatatgcgtaaatccttcaacggtctgggtgaacaggtacaacatgtgctggatgagaaccccttctccggtcacctgttcatcttccgtggccgacggagtgacatgattaaaatcctctgggctgatgctgatggtctgtgcctgttcaccaaacgcctggaggaaggcctgtttatctggcctgcggtgcgtgacggtaaggtatccattacccgctcgcagctggcaatgctcctcgataagctggactggcgtcagccaaaaacatcccgtcttaacgcactgacaatgttgtaaaaatgtcatggccggattataaaaacggtcatgagtcggaaatacctcattcgtatcactgagctggaaaggctgctctctgagcaggctgaagccctccgtcagagagatctgcaactgagtctggttgaagagacggaggccttcctgcgctctgcactggcacgtgccgaagaaaagatcgaagaggaggagcgggaaatagaatatctgagggcccagatagaaaaactgcgccggatgctgttcggtacccgttctgaaaaactgcagcgtgaggttgaacaggctgaggcccaactgaaacaacgcgaacaggaaagcgatcgttacagtgggcgtgaggatgacccgcaggttccccgccagttgcgacagtcacgtcatcgtcgtccgttaccagcacatcttccccgtgaaatacaccgcctggagcctgaagaaagttgttgcccggagtgtggcagtgagctggattatctgggtgaagtcagtgctgagcagctggaactggtgagtagcgccctgaaagtgatccgcactgttcgggtaaaaaaagcctgtacaaaatgtgactgtatagttgaagcgccagcgccgtcccgcccgatagcgcgcggcatcgcgggctccggattacttgcccgcgtgttaacgggaaaatactgcgaacacctgccactgtatcgtcagagtgaaatctttgcccgacagggtgccgaactgagccgtgcattaatctccaactgggttgacgcgtgctgccagttaatgactccgctaaatgatgccctgtaccgttacgtgatgaacacccgcaaggttcacactgacgacacaccggtaaaagtgctgacaccgggcagaaaaaaggcaaaaacaggacacatctggacgtatgtccgggatgaccggaatgcgggctcatcagagccaccggcggtctggttcgcctactcaccagacaggcagggaaaacatccggtacaacaccttcgtcccttccggggtatcctgcaggcggatgcattcagcggttacgatcggctgttcagtgccaaacgtgaaggtggtgcacagacagaagttgcgtgctgggtccatgcccggcgaaaaatacacgatgtatgaacgacatctcttctgacgacattttcctgctgaaacagcgcctggccgaacaggaagcgctgatccacgccctgcaggaaaagctgagcaaccgggagcgcgaaatagaccatctgcaggcgcagctggataaactccgccggatgaacttcggcagtcgttccgaaaaagtctcccgccgtatcgcacaaatggaagccgatctgaaccggcttcagaaagagagcgatacgctgactggtagggtgtatgacccggcagtacagcgtccgttgcgtcagacccgcacccgtaagccgttccctgaatcactaccccgtgacgaaaagcgactgttgcctgcggcgccgtgctgcccgaactgcggcggttcactgagctatctgggcgaggatatcgccgaacagctggagttgatgcgtagcgccttccgggttatccggacggtacgggaaaaacatgcctgtactcagtgcgatgccatcgtgcaggcacctgcaccttcgcggcccatcgagcggggtatcgccggaccggggctgctggcccgcgtgctgacctcgaagtatgcagagcacaccccgctgtatcgccagtcagaaatatacggccggcaaggtgtggagctgagccgttcactgctgtcgggctgggtggatgcatgctgccggcagctgtctccgctggaagaggcgcttcatggctatgtgctgactgacggtaagctccatgctgatgacacgcctgtcccggtgctgttgccaggcaataagaaaacgaagaccgggcggttatggacctgcgttcgtgacgaccgtaacgccgggtcaacgctggcgccggcggtgtggttcgcttacagcccggacagaaaaggcatccatccgcagacccatcttgcggggttcagtggtgtactgcaggcggatgcatacgccgggttcaacgagctgtaccgggatggccggataacggaagccgcctgttgggctcacgcccgccgtaaaatccacgatgtgcacgttcgcaccccgtcagccctgacggaggaagcgctgaaacggatcggcgaactgtacgccatcgaggcagagataaggggaatgacggcggagcagcgccttgccgaacgtcagttgaaaacgaaaccgctgctgaaatccctggaaagctggctgcgtgaaaagatgaaaaccctgtcgcgacactcagaactggcgaaagcgttcgcatacgccctgaaccagtggccggcgctgacgtactatgcagatgatggctgggctgaggcggacaataacatcgctgaaaatgcgttgcggatggtcagtctgggccgcaaaaactacctgttcttcggttcggatcatggaggagagcggggagcgctgctgtacagcctgatcgggacgtgcaaactgaacggagtggagccagaaagctacctccgctatgtccttgacgtcatagccgactggccgataaaccgggtcggcgaactgctcccctggcgcgtagcactgccgactgaataacacatccccgtcaatacggtttttgctgcacgcttacccttctgttgctcactcagggcatgtaaatcatgctcaaaccacgccccctgagcatctgtctgcagaatcaaccggccatgacaggaaaggcagaaacaatgccggatatttctgctgagcgcagagtcggcactgataatgtgctcacccggcgtgatccccagccccgtttttataccgttcattctgctaccccctcctcactgaaacgcccggtctggcagtgtgtgcagtactgctccccataataatcgtggtgacattgcctgcagtaccagctggctttacgtaccacgggtaaggcatccgggacgaattgctgcagacgtttaatcaaccgtatttctctgcgttccggcctgacataaggacattgctgcgcgtgctccgtcagcccgtcgtcagtgtgttcaaaccagggccgttcggtgtcgtattgcgggtggtatctgagtgcactgccgcaaaggtggcaggtgtagtgggcataaggagcagtttgtgcggtacgggcaccggtcagacgtccgttgccatcaagtgcgagaaaagattttgcgtacatagtatatgttcctctgcgccagacgacacacaggcaacagccgtcccggtacgggcagcgtggtcaggtgtgaatggcggttttcagttcagtctcagaagggaaaatcagtgtggtcgctgtgaacacgtcatcacactaaggtcagataagtcgtctgtcgggctcagccacgactgcagccaaagttgcgctcaccggtgccgtaagctttggtactctccttcgccagatagtcagcacgctccagcacctgctgaaagccggtgtcatcatcgcgttccagccacaccgccggcctgaccggaaaatgtgccagcgtgtcataacgtccggcatccactcccagggcactgcaccacgcctgtttaatcatcccggccagtgatcccggagcgcggtaatcgccggcacgacaccaggtatcccggttgaccagcagcatcaggtgatagtgttttttacctttgcactccccaaactcccgggcccagacgtaatgcagggttgtgggatgcacgcgtttaccttcccgatgcttacgtttctggtaagcgtcgattcgggctttcagggcattgatgaagcgggatatcacagctgcgtccgttgctgccggtacatccgggaaacgcaggtcaacccgcaatgccgtcaggcgggaatgaacattcagtgcgtgccgcaccgtctcacgaatacgttgctgccagaaggggttgtatttgtaggtcatggttaaatctccgtatggttcatacggaataaccacgtcgtaaaaaatgcgcagagcccctgaggtgacctccggcaggacactgtctcaggcactctgtgataacccgaacggtcatcgccggactgacgattgaattcccggcgttgtttttttaatgtaaaaaacaggttacggataaggcgtggagagggagcgatcgtgatatgcaaaaagaagtgcagggactgtggtaacgcaattactcataatacagtatgttgcccgtattgtggcgctgtcgaccccttcggttattaccggaagaccgatcgtctgctctgtttactgacgttactgctggtgctgattctggttaccgtttcaggcgtcagtgtatttgtactgttgcagtaggttacagaggagggattatcaggaatcggcggggcagagcgacccgctgcgtttgttgtgccagacagtaacgcaccggctccctgcaaaatggtacctgaatcaatcacagtcaggtattccgccaatccgtgatcgaatcgagcggaatactcagccccgacaaatacgagtccccttcagaagatacaggccggtaatgcctgaacgcctgcccctctgtacaccattcccttttgatttcgaattctttgttgccgttatactgcttaatgttcccgatcttccggtgcacagataacaccggagtcatcgtagcgcggattcaagattcaggtgacatatttccagacggaagccggcacgcgatcgtaaagtttgttcattgtcagttctgccagccggtgatcgaccgcagagttaaaggcttccagctccgcaggggtaagtttataacgtgtgtgggaaatcactttttccagcgtctcccgggatgaacaacgacggaactgctctggttttaacttccattcgtctctcgttactttatgctgtaatcaacgtgatactgccagcataccgcaccagactgacattctggtaccctccccaaactcattactcccgtgcaaccacttaaccggtctctcagcaatatcgccttaacgctacgtttagttatccgacaccggatgtccgatgccattgcgacaacctgaaggtaaccagccagttagctgagatgttaagctgctggctgcatacaccttgccaaatctaatcgctgttatcttaaccaatttccaggatacaagggggcgattactgagaatgctctcagactgtcactcaccagatcggatacgtttaccgctcaggcggatgcttaatgcactctgttcaggtgcattgcaggtacgttttatgtacgcaggttatacgccagttatcagggataaccctgtgagtacaacgcaatctgttgctactgggtagactggtctgctgatcacactcacagatttatttcacatatatgaactcatgtgtttgagctctcttatatatttataataccaatcagacagtcttatcccaccagtgatacctgtcgcctgcccacaggtcacgggctgatgcaccacaaccgccttcaaaaacaactctgcaattatcagaacgccagttttccccttgtctcacgaaagtcctccctcctttatcacgtgcgcgtgcggaagcatcgtttcgcaacaatcacccgacataccggtacggctcagccaccgcaatccccccgtttatctcctgacggtcacattcccgattattttttacgtttttccccggttgttatgccggggaaggtggtgcgttgttttcatcaccaacgccggttgagattaacaacatccggaggaacattttcatgaataccccagtttcactgatggatgaccagatggtcgacatgtcgtttatcactcagctgaccggcctgaccgataaatggttttacaagctcatcaaggatggtgcctttcctgcccccatcaaactgggccgtagctcccgatggctgaaaagtgaagtggaagcctggttgcaggcacgtattacacagtcccgtccgtaattcctgaccgttatccgttcaaccgcagcaaaggcatgatccggcccccggaggcattttgctgcgcgctaaaggagagaatattatgcaaaaacttgaaaaccggtgtgagctgctgctcatccagcatcagaaatggatgacaaacgtgacgaggcttatcgtcgctcatggaatgggggctccgcatcttcatggttatcaccgcctgaccctggcccacttttttctgccagaaaaaggcaccatcatctcagtggcaccacagggactctatcaggtcgtcaacccgggaacaccaccgttcattcctgccattcaggaagggttaatgaccagcattcagacccatgaaatcatgctgcttacacattttaatctgggcggcgttttactcagtgagctacatcgtctgggtgaaaaccggctggcaaacaggctgaacagcctgctccggcgtttcgacgatcgtgatctctaccacacgctgatatggctgtgctggtatgatctgatgtgtgcccactccatgcagccctggactgaagagttaaagcataaatcacatgcagagcttgaaaactgggctgtggcgcgcaaacgggaaaagcgcgagctggaactgatgattgacgagtacctgttatacgcctgttgattcataacgctcccgggcctccgcacacttacttttcctccgtcaccctcatgcagaagcgggggtgacgggcatactgcgataccaccactgaataatccgtctcagcaacagggaacattataagccaaaggattgctcatgccatcttatcagtttctggctgtagcacgcattcagttcaggcagcgtgatattgtttatttcggaaagcaggacataggtggtttttccttcctgcacgacagagagcctgagttgagatgcaagaatgttcagcaggacgttcagctttttcctgttccggaaccggcccgggccacactggagaatataatttttcctgacacggggcgggcattctccgcggcactcctcaatgagccagtcgagcagctcccgggcgtcctgcagctgcagttcagattcatcaggtaacgcaaataattttttatattcatctgtgtaccacgaacttattacgacagcagacgtcatgatatcggcagagattttcccttcaccctgactgaaatactgcaataacgcagcaattctcgcaatgttttctgttttttttgaaacatgtccccgaaactggcttaagggtccggaaggagacaaatcctgctccagaacattatagtgatcaataaatattttttgcgcttcaggagaaaaatgcagacaataacgttcatccttactggatttttcaatactgcctctggccagctccattaatcgttcatgaaatgccgttaatgatcctcccggggtcacagctccgttaataaagcgtttcccctgcgtggtggcaggtttactgattagacaacgggcaagaaaaccactgtccctggcaacagaaccttttcgctccatatatcggtcaaaaagaccgggttgtaccatgagggataatgtcattctggcattttcaatcatctgttcgggttcattctttctgtccaccgacaatacggagccatcccacattttgttaataaaaggcagctcagacagggtatacccatcaaatattataccggcttcatctgacataatacccactgaacgccatttaccacaaagctgattcttaattgccgcagtcgtggcatcattaaaaatgaatttatatcttacaggtttttcccctctgtttttctgaagcgcttccagttgtctgagcgtttctgactcatccgcgcctttgcggagttctttattcagttttgacaacaatgcttttttctgcgcctttaaaagctcttccttatttttccatgtcgtcagttcatttttgtgtctggaatataacagcatctcctgctggtacaggggctccattaataatttgtccactgcggtttttcgttctccggactcagcaagcgtcagtaagaaaagagaaaccggcccccgtagtgtattcagtctgcagacatcaatcagattctggcagacaagtgaaacagcgcccagggcagatgctgccacaagccccaggggagcctgcgtgatttgctgagcttcaataacggcatcacgaatgagtggaggcagcgagctcaggggaaactcatcaggatactgaaagtatggcataatgacctcacaacacacagaacataaagtaccgcaactattgctactaatagcaaaaatagcagcagaatcaatacaggataaaaatttctgtcgattttcagattaaataataaccattcggtattttgtcgctaaagaatgtcagaatgaatctgtgcgtctacgggcgctctccggaacacacacgttgattaaatttcacacaacaacgtaccagcaaaaagcatcatccagggtattgcaggtacgggtttcctgccgggaataaacataaacagtttccccggagtaacgctttcagaaaactgccctcctgaagaagaataaaataaagaaaatgacagttcctgcactgaatgctgagtacaatattctatggacaggatgacatttttataaataacaaaaaccatttaatactgatacatcaataaaatacttcctccctgctgacacagataaaatgcaacattttttcttcaaatacttctgtataatcgccagccaatgatgagaatggattaaaataacacttcttcgacaaacacaaaaaccagccttcattttcacatcatcatccagttttaattaaaccctgacgagcgacagtatttcagttcaggaattaaaagccagctattactcagtaaaaacaccaccaactaataatatctcagcagatatttcctgaccaggatgacacatttattaaagtttttttacaggacacttcacattactgaacgctattccgacagtatcactacacaaataaaaaagggaactggataaatattcatgccggaagaatggtgtaacaaaagcatttaatcattacgtgcgtattcctatctattcgatcacggtttggccaaaccgtgatcgattcagatgccattttgcaagtacgcatgacccggaagggaaacacttaacaacatggtatcaacagatatcattacgtgcgcactcttataaaaatacacagcagaagcaagataactctaaacgtaaatttaatatctcccactgactgccccgacaatatactgaaaaatactcacctcagtaaacataaacacacctgataatcaggctgcaagatgaatatttttctcctttacggagtaatcagcctgctgtttaacaataaccgcgtattttcatggaaggatatcacccaataacggataactcctgccctccttcatgttaatacgcaacatccccatcgattccaaacaatttcagacagatattatctccgtggatcccccgccacctttccggtgtgcggggttttgtcttttttcaccgggaatacatgtatgaatccgtctgatgccattgaggcaattgaaaaaccgctctcctccctgccttactcgctttcccgtcacatcctggaacatctgcgcaaactcacccgtcacgagcccgtgattggcattatgggtaaaagcggggccggtaaatcttcactctgtaatgccctgtttcagggggaggtcacaccggtcagtgatgttcacgccggcacccgggaagtgcagcgcttccgtctgagtggtcacggttacagcatggttatcactgacctgcccggggtgggcgagagccgggacagggatgcagagtatgaagccctgtaccgtgacattctgcctgaactggacctggtgctgtggctgattaaagccgatgaccgggccctgtctgtggatgagtatttctggcgacacatcctgcagtgcggacatcagcaggtgctgtttgtggtgacacaggccgacaaaacggagccctgccatgaatgggatatggccggcattcagccctctcccgcacaggcacagaacattcgcgaaaaaacggaggcggtattccgtctgttccggcctgtacatccggttgtggccgtatcggcccgcaccggctgggaagtggatacgctggtcagtgcgctcatgacagcgcttcccgaccatgccgccagtcccctgatgacccgcctgcaggacgagctgcgcacggaatctgtccgcgctcaggcccgtgagcagtttaccggtgcggtggaccggatatttgacacagcggagagcgtctgtgttgcctctgttgcacgcacggttctgcgtgccgtccgtgacacagtggtctctgttgcccgcgcggtatggaactggatcttcttctgaacctgttgtggatgatgtcctccctgcctctaagtatgctcacaaaagcgctgttttcgttactgtctctcttgtccgtgcaatagcttgataaaagaataaaacgatcaatacccattttaccgatcgttaatatcgatcgttatgctaataataactcctgttagcaacgtgcgcagatacacacagacatgagattcagggaacaacagagccacacgtcagaaacttccgtcagccggacctccggcactgtaaccctttacctgccggtatccacatctgtggataccggcttttttattcaccctcactctgattaaggaaatgctgatgaaacgacatctgaatacctgctacaggctggtatggaatcacattacgggcgctttcgtggttgcctccgaactggcccgcgcacggggtaaacgtggcggtgtggcggtggcactgtctcttgccgcggtcacgtcactcccggtgctggctgctgacatcgttgtgcacccgtgtgaaacagtgaatggcggaacactggtaaaccatgacaaccagtttgtatccggaacagctgatggcgtgactgtcagtaccgggcttgagctggggccggacagtgacgaaaacaccggcgggcaatggataaaagcgggtggcacaggcagaaacaccactgtcaccgcaaatggtcgtcagattgtgcaggcaggaggaactgccagtgatacggttattcgtgatggcggagggcagagccttaacggactggcggtgaacaccacgctggataacagaggtgagcagtgggtacacgggggagggaaagctgccggtacaattattaaccaggatggttaccagaccataaaacatggcggactggcaaccggaaccatcgtcaacaccggtgcagaaggtggtccggagtctgaaaatgtgtccagcggtcagatggtcggagggacggctgaatccaccaccatcaataaaaatggccggcaggttatctggtcttcggggatggcacgggacaccctcatttacgccggtggtgaccagacggtacacggagaggcacataacacccgactggaggggggtaaccagtatgtacacaacggtggcacggcaacagagacgctgataaaccgtgatggctggcaggtgattaaggaaggaggaactgccgcgcataccaccatcaaccagaaaggaaagctgcaggtgaatgccggcggtaaagcgtctgatgtcacccagaacacgggcggtgcactggttaccagtacagctgcaaccgtcaccggcacaaaccgcctgggagcattctccgttgtggcgggtaaggctgataatgtcgtactggaaaatggcggacgtctggatgtgctgagcggacacacagccactaatacccgtgtggatgatggcggaacgctggatatccgcaacggtggtgccgccaccaccgtatccatggggaatggcggtgtactgctggccgattccggtgccgctgtcagtggtacccggagcgacggaaaggcattcagtatcggaggcggtcaggcggatgccctgatgctggaaaaaggcagttcattcacgctgaacgccggtgatacggccacggataccacggtaaatggcggactgttcaccgccaggggcggcacactggcgggcaccaccacgctgaataacggcgccacacttaccctttccgggaagacggtgaacaacgataccctgaccatccgtgaaggcgatgcactcctgcagggaggcgctcttaccggtaacggcagcgtggaaaaatcaggaagtggcacactcactgtcagcaacaccacactcacccagaaagccgtcaacctgaatgaaggcacgctgacgctgaacgacagtaccgtcaccacggatgtcattgctcagcgcggtacagccctgaagctgaccggcagcacagtgctgaacggtgccattgaccccacgaatgtcaccctgacatccggtgccacctggaatatccccgataacgccacggttcagtcggtggtggatgacctcagccatgccggacagattcatttcacctccgcccgcacagggaagttcgttccgacaactctgcaggtgaaaaacctgaacgggcagaatggcaccatcagcctgcgtgtacgcccggatatggcgcagaacaatgctgacagactggtcattgacggtggcagggcaaccggaaaaaccatcctgaatctggtgaacgccggcaacagtggtacggggctggcgaccaccggtaagggtattcaggtggttgaggccattaacggtgccaccacggaggaaggggcttttgtccaggggaatatgttgcaggccggggcctttaactacaccctcaaccgggacagtgatgagagctggtatctgcgcagtgaaaatgcttatcgtgctgaagtccccctgtatgcctccatgctgacacaggcaatggactatgaccggattctggcaggctcccgcagccatcagaccggtgtaaacggtgaaaataacagcgtccgtctcagcattcagggcggccatctcggtcacgataacaacggcggtattgtccgtggtgccacgccggaaagcagcggcagctatggcttcgtccgtctggagggtgacctgctcagaacagaggttgccggtatgtcactgacgacaggagtgtatggtgctgcaggccattcttccgttgatgttaaggatgatgacggctcccgtgccggcacggtccgggatgatgccggcagcctgggcggatacctgaatctggtacacacgtcctccggcctgtgggctgacattgtggcacagggaacccgccacagcatgaaagcgtcatcggacaataacgacttccgcgcccggggccggggctggcagggctcactggaaaccggtctgccattcagtatcactgacaacctgatgctggagccacaactgcagtatacctggcagggactttccctggatgacggccaggataacgccggttatgtgaagttcgggcatggcagtgcacaacatgtgcgtgccggtttccgtctgggcagccacaacgatatgacctttggtgaaggcacctcatcccgtgacaccctgcgcgacagtacaaaacacggtgtgagtgaactgcctgtgaactggtgggtacagccttctgttatccgcaccttcagctcccggggagacatgagcatgggtacagccgcagccggcagtaacatgacgttctcaccgtcccggaatggcacgtcactggacctgcaggccggactggaagcccgtgtccgggaaaatatcaccctgggcgttcaggccggttatgcccacagtgtcagcggcaacagcgctgaaggctataacggtcaggccacgctgaatgtgaccttctgacagaaccatcgcctctttgtggtcccgatcatcatgatcgggacccggaccggcgcaacggatattcaacgccacattcgctggcattaacagtgcggcattcgacggacagaacggacagtatcgttacatgggaaatcatggtcccatgcaactggaagtcccccgtgatcagtatgccggcgctgtggaaaccatgaagaataagatccgcgaaggtaaagtacccggtgtaaccgatcccgcagaagcgtcccggctgattcgtcggggacatctgacttatacccaggcccgtaatatcacccggttcgggaccatcgaatcggtcacttatgatattgccgaggggtcggttgtcagtctggcgaccggagggatcagttttgccctgacggcatcggtcttctggctcagcaccggcgatcgcgatgctgccctgcagacagctgctgtccaggcaggaaaaaccttcacccgcacactggctgtctacgtcacaacccagcaacttcaccggctcagtgttgttcagggtatgctgaagcatattgatttttcgacggccagcccgactgtccggcaggcgcttcagaaggggaccggtgcaggaaatatcagtgccctgaacaaagtgatgaagggttcgctggtgacatctctggcactggtagctgtcacaaccggccctgacatgatcaaaatgttgcggggacggatctccggtgcgcagttcatcaggaatcttgccgtggcatcttcctgtgtggcaggtggtgctgtcgggtcagtggcgggcgggatattgttcagtccactgggaccatttggtgcactgacagggcgtgtggttggcggtgttctggggggaatgattgcctccgctgtatcaggaaaaattgccggagcgctggttgaagaagatcgcgtcaaaattctggcaatgattcaggagcagatgacatggcttgccggcagtttcctgctgaccggacatgagattgaaaatctgaacgcgaatctggcccgtgttatcgatcagaatgctctggagatcattttcgccgccggtatacaacaacgggccgcgaccaacatgttaatcaaaccactggtggtcagtatcatcaggcaacgccccgtcatggaatatgatgcatcccatctcggcaatatggttaaccgactggaagaaacattacccccggagttaccggcataacggctattctgcgccttttacgttttatcacctgatttgtcagtgtcatcgtcatgactcagagaggtaaataccatgattcacctgttcaaaacctgcatgattaccgccttcattctggggttaacgtggtctgccccactccgggcacaggatcaacgttacatcagtatacgcaatacagatacgatatggctcccgggaaatatttgtgcttaccagttccggctggataatggcggaaacgatgaaggatttggccccctcaccatcactctgcaactcaaagacaaatatggtcagacgctggtgaccagaaaaatggaaacggaagcctttggtgacagtaatgccacgcgaaccacagacgcatttctggaaacggagtgcgtggaaaatgtcgccacaaccgaaatcattaaagcaactgaagaaagtaacggccatcgtgtcagtctgccgttatcggttttcgatccccaggactaccatccactgctgattaccgtttccggaaaaaacgttaactgatccctgaagtcagtttcatgcttcagcctctgtcacaacgcgtggcagaggctttttatttatcaggagaaaacagatatgctgggttacacagagtatgtcctggctgaaggatctttctcatacgggcaggcggttgctgtcataaccgcttaccgcaatgtgtttatccaggatgacccgggaatgcatttccgtcgggttatccgcaacgcggaaggtcagcgacgctggcgctgccggaactctgaagctgatgccggaaaacagcttaatgcgtggctcgccagtggagggcttctcagacaataaacctcattgatttcatccatcaggccgcgtcttctccgggagacgcggcttttttcatttattncaccagtaaatcttaaccaccgataaggagcaaantatgcgantagccagtcgttttggttatgcnaaccagatacgncgtgaccgtccnctgacacangaaganctgatgcacnatgtgccggggattttcggggaaganaaacacacgtcccgaagccagaactatacgtacatccccaccatcaccgtactggaaagcctgcagcgggaaggctttcagccattcttcgcctgccagacccgtgtgcgcgacccgggccgccggggatacacnaaacacatgctgcgtctgcggcgggccggagagataaacggagancatgtccctgaaattattctgctcaactctcatgacggtacctccagctaccagatgctgccgggttacttcaggttcgtctgccagaacggntgcgtctgtggtcagtctctgggggaagtgcgtgttccncaccgggganangtngtggananagtnattgaaggggcttacgaggtngtgggcgtgtttgaccggatngagganaagcgtgatgccatgcagtcgctgntnctgccgccaccggcacgccaggcgctggcacaggcggcactgacttaccgttatggtgacgaacatcagcccgtcaccaccgccgacattctgacgccacgacgccgggaggattacggtaaggacctgtggagtgcttatcagaccatncaggagaatatgctgaaaggcggnatttcnggtcgcagngcnaaaggaaaacgtatccatacccgngccattcacagcattganacngacattaagctcaaccgngcattgtgggtgatggcngaaacnntgctggagagcctgcgctgatncanncatnnccctgaannccncncatttatttnncnttnaaggantcattncatgaaaaccatttcncanaattccaccacntcttcngtttccgtaaccnntgcancngngantgnccngcnncanntggttgccaccatagtccctgatgaacagcgcatcagcttctggccgcagcattttggcctcattccacagtgggtgnccctggagccccgngtnttcggctggatggaccgtctgtnngaagactactgcggtggtatctggaatctgtacaccctgaacaacggnggngcatttatggcncccgaaccggatgacgatgatgacgaaacatgggtnctgttnaangncatgaacggnaaccgcgctgaaatgagcccggaagccgcnggcattgcngcctgtctgatgacgtacagtcatcacgcctgncgtacggagtgttatgccatgacggtncattattaccgnctgcgggattacgccctgcagcatccggaatgcagcgccattatgcgcatnatngactgaanggnggcaggnacaatgcancagntttcctttctgcccggagaaatgacgcccggcgagcgcagtctcattctgcgggcnctgaaaaccctggaccgccatcttcatgaacccggngtggccttcacctccacccgtgcggcacgggaatggctgattctgaacatggcgggactggagcgtgaagagttccgggtgctgtatctgaataaccagaatcagctgattgccggtgaaaccctcttcaccggcaccatcaaccgcacggaagtccatccccgggaagtgattaaacgcgccctgtancacaatgccgcngccgtggtnctggcncacaatcacccgtccggtgaagtcacncccagtaaggcagaccgncttatcacngaacgtctggtacaggcactgggcctggtggatatccgggtgccggaccatctgatagtcggtggcanccaggttttctcctttgccgaacatggtctgctttaacccgtcacaaccacatcacacctgttttcacttttatcttctgtcttcagaggtatcccattatgaaaatnatcacncgtggtgaagccatgcgtattcaccaacancatccnncatcccgtcttttnccgttctgtaccggcaaataccgctggcacggcagcactgaagcgtataccggtcgtgaagtgcaggatattcccggtgtgttggccgtgtttgctgaacgtcgtaaggacagttttggcccgtatgtccggctgatgagcgtcaccctgaactgaatcaggacgggcattcagatgagcagcattatcaccatcacagtgtatacgctggatgaactttcctgcccggcacggggaaaagcccgcgactggtaccgtcagcatcatgctgacagcaactggtatgaaaacgtgtatgaagacttcagggaggtctgtggcattttcgggattgacctccgccagcgcgttttccggctcagcaatggcaggtttatggaagagccgtgcatctggttcagcggattctgcagccagggggacggagcctgttttgaagggcgctggcactggcagccagcgacaccccggaaaatcagggaatatgcccctcaggaccgtgagcttcatcgtatcgcggataccctgcaggcggtgcagaaacgtaacttctggcagcttcaggctgaaatcagtcaccggggacgttactgccatccgtacagcatggatatcaccgtcacccggaacagtccgactggtcaggcaatgacaaccgatgcggaagccgctgtcagcgaagccctgcgcgacctggccttctggntgtaccgncanctggaaaacnagtacgactggctgacctcagacnccgctgtggatgaggccctnctcatcaacgaatacaccttcaccgaagccggtctgngcnccggctgacccgtcatcgttaaactatcattcaccgattttctgtgaggantttatcntgtcngacacnctccnngnaacaannnntcccgacgacaacaangaccncccctggtgggggctnccctgcaccgtgacgccctgtttcggngcncgtctggtgcaggagggnaancngttgcattaccttgccgaccgngccggtatcagaggncngttcagcgangcngatgcntaccanctggaccaggcntttccnntgctgatgaaacaactgganctcatgctcaccagnggtgaactnannccccgcnatcagcataccgtcacgctgtatgcnanaggnctgacctgcgaagccganaccctnggcnnctgtgnttacgtttatntggctgtttatccgacgcccgnaannannnnntaactctccngaatagccttctgctacggcctggtgttttcaccacgccacttttccanntttannnctncatnncagganaatcttnagtatgaaaacattaccngacacacacgtacgggnggcatcgcgctgcccgtctcccgtcaccatctggcagacactgctcacccgactgntggaccagcantanggcctcacnctgaatgacacaccgttcgctgatgaacgtgtgattgagcagcatattgaggcagggatttcactgtgtgacgcggtgaactttctcgttgaaaaatacgcgcnggtacgnacngaccagccgggattcagcgcaggagncccgtcgcagttaatcaacagcatngatattctccgggcncgcngggcnaccggcctgatgacccgnnacaattacagaanggtaaatnacattacccngggcangcatccggaggcnaaacnatgaanctnnccctgacgcnggangcngacngcnttaacgtacaggcnntgaacatggggcgnattgtcgttgacgtcgatggtgttnannttgcngaactgattaacgtggnctgcgnnaatggctactcccttcgtgttgttgatgaatctgaccggaccncaacngacagcatnccnccctcngctgccctgagcggtatacgctgnagnaccncncatatcacggaaacagacaacgcntggctgtactcgctgtcgcatcagacgaatgacaccggcgaatcagaatggattcattttacaggnagcggatatctgttacgtaccgatgcgtggtcatacccggttctgcggcttaaacgcctgggnctgtcaanaacgttccgncgtctggtngtcacnctnacccgncgttatggcgtcagtctcattcatctggaatggaaacggaagcctttggtgacagtaatgccacgcgaaccacagacgcatttctggaaacggagtgcgtggaaaatgtcgccacaaccgaaatcattaaagcaactgaagaaagtaacggccatcgtgtcagtctgccgttatcggttttcgatccccaggactaccatccactgctgattaccgtttccggaaaaaacgttaactgatccctgaagtcagtttcatgcttcagcctctgtcacaacgcgtggcagaggctttttatttatcaggagaaaacagatatgctgggttacacagagtatgtcctggctgaaggatctttctcatacgggcaggcggttgctgtcataaccgcttaccgcaatgtgtttatccaggatgacccgggaatgcatttccgtcgggttatccgcaacgcggaaggtcagcgacgctggcgctgccggaactctgaagctgatgccggaaaacagcttaatgcgtggctcgccagtggagggcttctcagacaataaacctcattgatttcatccatcaggccgcgtcttctccgggagacgcggcttttttcatttattncaccagtaaatcttaaccaccgataaggagcaaantatgcgantagccagtcgttttggttatactgcnaaccagatacgncgtgaccgtccnctgacacangaaganctgatgcacnatgtgccggggattttcggggaaganaaacacacgtcccgaagccagaactatacgtacatccccaccatcaccgtactggaaagcctgcagcgggaaggctttcagccattcttcgcctgccagacccgtgtgcgcgacccgggccgccggggatacacnaaacacatgctgcgtctgcggcgggccggagagataaacggagancatgtccctgaaattattctgctcaactctcatgacggtacctccagctaccagatgctgccgggttacttcaggttcgtctgccagaacggntgcgtctgtggtcagtctctgggggaagtgcgtgttccncaccgggganangtngtggananagtnattgaaggggcttacgaggtngtgggcgtgtttgaccggattgaggaaaagcgtgatgccatgcagtcgctgattctgccgccaccggcacgccaggcgctggcacaggcggcactgacttaccgttatggtgacgaacatcagcccgtcaccaccgccgacattctgacgccacgacgccgggaggattacggtaaggacctgtggagtgcttatcagaccattcaggagaatatgctgaaaggcggaatttcaggtcgcagcgctaaaggaaaacgtatccatacccgtgccattcacagcattgacactgacattaagctcaaccgcgcattgtgggtgatggcggaaaccctgctggagagcctgcgctgattcagccattaccctgaaaaccacgcatttatttgtcctttaaggagtcatttcatgaaaaccatttcacataattccaccacatcttctgtttccgtaaccgctgcatcagggaatgaccagcctcagttggttgccaccatagtccctgatgaacagcgcatcagcttctggccgcagcattttggcctcattccacagtgggtggccctggagccccgtgttttcggctggatggaccgtctgtgcgaagactactgcggtggtatctggaatctgtacaccctgaacaacggcggggcatttatggcccccgaaccggatgacgatgatgacgaaacatgggtactgttcaatgccatgaacggcaaccgcgctgaaatgagcccggaagccgctggcattgctgcctgtctgatgacgtacagtcatcacgcctgtcgtacggagtgttatgccatgacggtccattattaccggctgcgggattacgccctgcagcatccggaatgcagcgccattatgcgcatcatcgactgaatggaggcagggacaatgcagcagctttcctttctgcccggagaaatgacgcccggcgagcgcagtctcattctgcgggctctgaaaaccctggaccgccatcttcatgaacccggtgtggccttcacctccacccgtgcggcacgggaatggctgattctgaacatggcgggactggagcgtgaagagttccgggtgctgtatctgaataaccagaatcagctgattgccggtgaaaccctcttcaccggcaccatcaaccgcacggaagtccatccccgggaagtgattaaacgcgccctgtaccacaatgccgctgccgtggtactggcgcacaatcacccgtccggtgaagtcacacccagtaaggcagaccggcttatcaccgaacgtctggtacaggcactgggcctggtggatatccgggtgccggaccatctgatagtcggtggcaaccaggttttctcctttgccgaacatggtctgctttaacccgtcacaaccacatcacacctgttttcacttttatcttctgtcttcagaggtatcccattatgaaaattatcactcgtggtgaagccatgcgtattcaccaacaacatccgacatcccgtcttttcccgttctgtaccggcaaataccgctggcacggcagcactgaagcgtataccggtcgtgaagtgcaggatattcccggtgtgttggccgtgtttgctgaacgtcgtaaggacagttttggcccgtatgtccggctgatgagcgtcaccctgaactgaatcaggacgggcattcagatgagcagcattatcaccatcacagtgtatacgctggatgaactttcctgcccggcacggggaaaagcccgcgactggtaccgtcagcatcatgctgacagcaactggtatgaaaacgtgtatgaagacttcagggaggtctgtggcattttcgggattgacctccgccagcgcgttttccggctcagcaatggcaggtttatggaagagccgtgcatctggttcagcggattctgcagccagggggacggagcctgttttgaagggcgctggcactggcagccagcgacaccccggaaaatcagggaatatgcccctcaggacaacgttaactgatccctgaagtcagtttcatgcttcagcctctgtcacaacgcgtggcagaggctttttatttatcaggagaaaacagatatgctgggttacacagagtatgtcctggctgaaggatctttctcatacgggcaggcggttgctgtcataaccgcttaccgcaatgtgtttatccaggatgacccgggaatgcatttccgtcgggttatccgcaacgcggaaggtcagcgacgctggcgctgccggaactctgaagctgatgccggaaaacagcttaatgcgtggctcgccagtggagggcttctcagacaataaacctcattgatttcatccatcaggccgcgtcttctccgggagacgcggcttttttcatttattacaccagtaaatcttaaccaccgataaggagcaaattatgcgactagccagtcgttttggttatgcgaaccagatacgccgtgaccgtccgctgacacacgaagaactgatgcactatgtgccggggattttcggggaagataaacacacgtcccgaagccagaactatacgtacatccccaccatcaccgtactggaaagcctgcagcgggaaggctttcagccattcttcgcctgccagacccgtgtgcgcgacccgggccgccggggatacacaaaacacatgctgcgtctgcggcgggccggagagataaacggagaacatgtccctgaaattattctgctcaactctcatgacggtacctccagctaccagatgctgccgggttacttcaggttcgtctgccagaacgggtgcgtctgtggtcagtctctgggggaagtgcgtgttccgcaccggggaaatgtggtggacagagtcattgaaggggcttacgaggtagtgggcgtgtttgaccggattgaggaaaagcgtgatgccatgcagtcgctgattctgccgccaccggcacgccaggcgctggcacaggcggcactgacttaccgttatggtgacgaacatcagcccgtcaccaccgccgacattctgacgccacgacgccgggaggattacggtaaggacctgtggagtgcttatcagaccattcaggagaatatgctgaaaggcggaatttcaggtcgcagcgctaaaggaaaacgtatccatacccgtgccattcacagcattgacactgacattaagctcaaccgcgcattgtgggtgatggcggaaaccctgctggagagcctgcgctgattcagccattaccctgaaaaccacgcatttatttgtcctttaaggagtcatttcatgaaaaccatttcacataattccaccacatcttctgtttccgtaaccgctgcatcagggaatgaccagcctcagttggttgccaccatagtccctgatgaacagcgcatcagcttctggccgcagcattttggcctcattccacagtgggtggccctggagccccgtgttttcggctggatggaccgtctgtgcgaagactactgcggtggtatctggaatctgtacaccctgaacaacggcggggcatttatggcccccgaaccggatgacgatgatgacgaaacatgggtactgttcaatgccatgaacggcaaccgcgctgaaatgagcccggaagccgctggcattgctgcctgtctgatgacgtacagtcatcacgcctgtcgtacggagtgttatgccatgacggtccattattaccggctgcgggattacgccctgcagcatccggaatgcagcgccattatgcgcatcatcgactgaatggaggcagggacaatgcagcagctttcctttctgcccggagaaatgacgcccggcgagcgcagtctcattctgcgggctctgaaaaccctggaccgccatcttcatgaacccggtgtggccttcacctccacccgtgcggcacgggaatggctgattctgaacatggcgggactggagcgtgaagagttccgggtgctgtatctgaataaccagaatcagctgattgccggtgaaaccctcttcaccggcaccatcaaccgcacggaagtccatccccgggaagtgattaaacgcgccctgtaccacaatgccgctgccgtggtactggcgcacaatcacccgtccggtgaagtcacacccagtaaggcagaccggcttatcaccgaacgtctggtacaggcactgggcctggtggatatccgggtgccggaccatctgatagtcggtggcaaccaggttttctcctttgccgaacatggtctgctttaacccgtcacaaccacatcacacctgttttcacttttatcttctgtcttcagaggtatcccattatgaaaattatcactcgtggtgaagccatgcgtattcaccaacaacatccgacatcccgtcttttcccgttctgtaccggcaaataccgctggcacggcagcactgaagcgtataccggtcgtgaagtgcaggatattcccggtgtgttggccgtgtttgctgaacgtcgtaaggacagttttggcccgtatgtccggctgatgagcgtcaccctgaactgaatcaggacgggcattcagatgagcagcattatcaccatcacagtgtatacgctggatgaactttcctgcccggcacggggaaaagcccgcgactggtaccgtcagcatcatgctgacagcaactggtatgaaaacgtgtatgaagacttcagggaggtctgtggcattttcgggattgacctccgccagcgcgttttccggctcagcaatggcaggtttatggaagagccgtgcatctggttcagcggattctgcagccagggggacggagcctgttttgaagggcgctggcactggcagccagcgacaccccggaaaatcagggaatatgccccncaggaccgtgagcttcatcgtatcgcggataccctgcaggcggtgcagaaacgtaacttctggcagcttcaggctgaaatcagtcaccggggacgttactgccatccgtacagcatggatatcaccgtcacccggaacagtccgactggtcaggcaatgacaaccgatgcggaagccgctgtcagcgaagccctgcgcgacctggccttctggctgtaccgccagctggaaaacaagtacgactggctgacctcagacaccgctgtggatgaggcccttctcatcaacgaatacaccttcaccgaagccggtctgcgcgccggctgacccgtcatcgttaaactatcattcaccgattttctgtgaggattttatcatgtcggacacactccccggaacaacgcttcccgacgacaacaaagacctcccctggtgggggctgccctgcaccgtgacgccctgtttcggcgcccgtctggtgcaggagggtaaccggttgcattaccttgccgaccgtgccggtatcagaggcctgttcagcgatgcagatgcgtaccacctggaccaggcctttccgttgctgatgaaacaactggagctcatgctcaccagtggtgaactcagcccccgctatcagcataccgtcacgctgtatgcgaaaggactgacctgcgaagccgataccctgggctcctgtgattacgtttatctggctgtttatccgacgcccgaaatgaaaaattaactctccagaatagccttctgctacggcctggtgttttcaccacgccacttttccatttttatatctgcatatcaggaaaatcttcagtatgaaaacattacccgacacacacgtacgggcggcatcgcgctgcccgtctcccgtcaccatctggcagacactgctcacccgactgctggaccagcactatggcctcacgctgaatgacacaccgttcgctgatgaacgtgtgattgagcagcatattgaggcagggatttcactgtgtgacgcggtgaactttctcgttgaaaaatacgcgcaggtacgtaccgaccagccgggattcagcgcaggagccccgtcgcagttaatcaacagcattgatattctccgggctcgcagggcgaccggcctgatgacccggaacaattacagaatggtaaataacattacccagggcaagcatccggaggcaaaacgatgaaactggccctgacgctggaagctgacagcgttaacgtacaggcactgaacatggggcgaattgtcgttgacgtcgatggtgttgagcttgccgaactgattaacgtggtctgcgataatggctactcccttcgtgttgttgatgaatctgaccggacctcaacagacagcatacccccctctgctgccctgagcggtatacgctgtagtaccgcgcatatcacggaaacagacaacgcctggctgtactcgctgtcgcatcagacgaatgacaccggcgaatcagaatggattcattttacaggtagcggatatctgttacgtaccgatgcgtggtcatacccggttctgcggcttaaacgcctggggctgtcaaaaacgttccgccgtctggttgtcacacttacccgacgttatggcgtcagtctcattcatctggatgccagcactgaatgcctgccggatttacccactttcgactggtaacccggaaattcacaacatgaaatcattaaccacggaaacagcgctgtatattctgattgcgtggctgcaggacaatattgactgcgaatcagggattatcttcgacaacgatgaggataaaacggattcagcagcactgctgccctgcattaaacaggccagggaagatatccgtaccctgcgccaactgcagcttctgcaacagaaccggtgagtcttactcaccagacttcattccactgacgccagcctgaatacggctggcgttttcgtttataaaccaaaaggaaaaacgatgatgtcagatatcacaatctcccgcccggaactggtcaacggacatacggacgttatctgctcaaccagtatccgccacattctggctgtacgaaagagtgcgctgctgcaaatcgacacacttatccggcaactggcagaaatctcagtactgacagaaagtattggaggtaaaaccgccctggactgggcgatgaaacaggattttcgctgcggctgctggctcatggagaaaccggaaaccgcaatgaaagccatcacccgcaatctcgatcgcgaaatctggcgtgacctgatgcaacattccgggatgctgtcattaatggatgcgcaggcccatgatacatggtaccgctcactggagtacgataactttccggaaatcagcgaggcgaatatcctgagtacgtttgaacaactgcaccagaataaggatgacgtgtttgagcgaggtgtgatcaacctcttcagagggctgagctggaattacaaaaccaattgcccctgtaaatttggcaataaaattatcgtcaacaatctggtgagatgggaccgatggggattgcatcttatcaccgggcaacaggcagatcgactcgctgacctggaaagaatgctgcatctgttcagcggcaaaccgatccccgacagccgggaaaatatcatcattcggctggatgatcacatccgctccgttcagggcaaagcgtgctatgaagatgagatgttcagcatcagatactttaagaagggctccgcacacatcacgttcaggaaaccagaactggttgacaggctaaatgacataattgccaggcactatccaaatgtattagcagacaggtaatgtggccttgccccgctattaaacatgtcatatttttgctatcattgtgaaaatttttcggaggaaacatgactacaaaagaccgtattcagtcccgactgaaccgttcaaaacgttatgtgttcacccgggatgatttcagggatatcgctggctatgatcaggttggcagagctcttcgtacactggtaaacgaaggtaagttgatgaaagtgggctatggtgtttacaccaaagcccgtcgtaacatcatcactgggaaaatcatgcccgcagcgcctgggggctctgctgcagtaattacagaggccctggagcgcctgaatatcagataccgtctggcaggagcaacggaatgctacaataaaggtcagtccacacaaattcctgtatctctggggataaaaacaccttctcgatttaaaagaatgttaatagtagggaaaagtaaaatcaatgcctgaattaacatcattatttcctgacgttgccgatgcactggatattgaatctgtcgctatcgtcgaaaaagattattttgtggttgatcttttaagattattaaaagaaataaaaccagaaacacatactctcgtgtttgcaggaggtaccgcattatcaaaagcaggtatctcgctaaacagaatgtcagaagatattgatataaagctcgtgccaacagagaactttatgcaaaatggcagagacaagagaagaaaaattcgcaaggaaatcgtgcaaataatcacggatgttattcataattctgacattttcagcttggataatgaaaacgcccgtataacacgtgatgagtatcgttataacgaaatctcggtacgttatccccagacatttgcacaagtcccctgtcttcgtccatttattaagctggagttgatggaaagcactctgctggaacatccggaaagcagagatatttattcccttgtcacggagttaacgggtaaaggtacacctgtaacagcattcccctgtgccaccattttatccactcaggctgaaaagctcatctccatgatgcgaagaacagcagcacatcttcgtaatcccgaacaacaggatgatgagtttctggtacgtcacatttacgacaactactgcattgtcagggaaaaaggtgtgaatgttcctgtattgaaaaattttgttcagatatgtattcagctatggtaaccagtacccacaattttgtagctcaccagttgatgaacttaagaaagggctggatgcactccgggattatcctgtacacaaattgcgctttcaacgatttgttaaaccgatggtatttggtaatacacagattaactgggaagaagcctattccagtttcagacaaacagcgctaagtgttctgaccagctaacaaacgcgttaagtacgattccacaattcagcatatcgaaccagaccaaatgattacagcaaagcacaaaaaagagggattatagcgtcaaaagaattcgaattgcacatgggggcctcattggtggcctcaaaaacaacaaatacaaaataatctatataaaacaatttgttatacaatcagtttcattccgattccgggcaccactaattcttaagaacccgcccacaaggcgggtttttgcttttggatctttatataaaataaacttgggtgcataacgccatcaggtcttaaacactcccgaatcatcaataaacatcccccgctaacaaaacacagttcagttcacataacatccctgttatcccacacatatctgctggccgaacgacgccagtgcgcgtacggaggcaagagcagccctgcacatggcagcgcttgtggtaacctggtttaatccggtgaaagaggcgttttacatgcatctgccagcagccggaaaaaccaaaaaagtggcgctggttgactgtatgcgtaaattgctgaccatcctgaacgcaatgctcagaaagaacgaagagtgaaatgaatcgtagcatcatgttgctccataatttttacgttcaagacagttgattatcggcgcatatgactcaaaaagagcctgatgattgcctcttttccataggctctttctctgaagtgaaggaaggcccggaagaaagcactcgctggcatacgtgactccagctcaaccggagataatcaccattgttatttttctatttaataataatctcctgaaaaatagatatagcaaaaatacaatccggccagatttaattccgcattcattaccagaaataatcaacactacaactattatatcattcaatagtcaccgctaaaattttattattttcctcttctttacatagaaattatcaacctgtttattatgccgaatttaaataattaatcacaaaacaacatcaccattatttgcgtgttttatttattaataacatagtcatacgttctttttttacaaggaaataatcaattgataaattgtttttggtattaatagtcaagtaggaaacattttaacaaatgataaaaatcctaaattccttgttcataatgtaggagtgtgttaaataggtgggcaaaatttggttccctttctcgcctgtaatattgcagcgtcttcgcacctccatgagacattgcgacttaataagaaggtgataagtcctgcatataagcatggactgaccatggttttatattcattaaaaattttgttacaacccattgatttagcataaataaattatagtgggttcgggtttgttgtgactgtggcattatttccgtgcaaaggagctgatatgtctgaaagacatttacctgatgaccagagcagtactatcgatccatatctaattacctctgttcgccagactctggcagaacaaagcgcagcattacaaaacttgtctaaacaactggattccgggcagtaccagcgtgtccttaatttgataatgaactgtaaagggcacgttattctttcgggaatgggtaaatcagggcatgtcggtcgtaaaatgtcagcgacgctggcctctacgggtacgcctagtttctttattcatcctgcagaagctttccatggcgatctgggcatgattacgccttacgatcttctgatccttatttctgccagcggtgaaacggatgaaatcctcaagctagttccttcactgaaaaatttcggcaaccgaattatcgccattaccaataatggaaattccacgctggcgaaaaatgctgatgccgtgctggaactccacatggcgaatgaaacctgcccgaataatcttgcaccaacaacgtctaccacgctgacgatggcgatcggcgatgcgctggcgattgccatgatccaccaacgcaaatttatgccgaatgattttgcgcgctatcacccgggcggttcattaggtcgtcgcctgctgacccgcgttgctgatgtcatgcagcatgatgttcctgcggtacagctggatgcgtcatttaaaaccgtgattcaacgtatcaccagcggatgccagggaatggtgatggtagaagacgcagaaggtgggctagcgggcattatcaccgacggtgacctgcgtcgctttatggaaaaagaggattctctgacatccgccacggctgcgcagatgatgacacgtgaaccgctgacgctaccggaagacaccatgatcattgaagcggaagaaaaaatgcaaaagcaccgcgtctcaacgttattggtgaccaacaaggcaaataaagtcactggccttgtgcgcattttcgactaattaagcaacggggtgcgagaggttagtctctcattgagtttgcgccccactgaaactttgataatcgttacatgttgataaaagtgaagtctgccgtatcctggatgcgtgctcgtctgtctgccatctcactggcagatatccaaaaacacctggcgaaaatcatcattctggcaccgatggcggtgctgctgatctatctggctatcttcagccagcctcgctatatgagcgagtcgaaagtcgccattaaacgctcggatgatttaaacagcggcagcctgaattttggtctgcttctgggtgcctctaaccccagttccgcagaagatgcgttgtatctgaaagagtacatcaactcgccggatatgctggcggcgctggataagcaactaaattttcgtgaagcgtttagccacagcgggctcgattttcttaatcatcttagcaaggatgaaaccgcagaaggcttcctgaagtactacaaggaccgtatcaacgtctcgtatgacgataaaaccggattactgaatattcagacgcagggctttagcccggagtttgcgcttaagtttaaccaaaccgtgctgaaagagtcagagcgctttatcaatgagatgtcacatcgcatcgcgcgtgaccagcttgcctttgcagaaacggagatggaaaaggcacgccagcgtctggacgccagcaaagcggaattgctctcttatcaggacaacaacaacgttctggatccacaggcacaggcacaggcggcgagcacgttagtgaatacgctgatgggccagaagatccagatggaagcggacctgcggaacttgctgacgtatctgcgtgaggacgccccgcaagttgtgagtgcgcgtaatgcgattcagtcattgcaggcacaaattgacgaagaaaaaagcaaaatcactgcgccacagggtgacaagctaaaccgtatggcagtggattttgaagaaatcaaatcaaaagtagagttcaacaccgagctgtacaaactgaccctgacctccattgaaaagacccgtgtagaagcggctcgtaagctcaaggtgctgtcagtgatcagttcgccacagttgccgcaggaatcgtcttttccaaatatcccttatttgatcgcctgctggttactggtgtgctgcctgctgttcggcaccctgaaactgttgctggctgttattgaagatcaccgagactaacgctgtcgctgaatgagtttgtgatgaaattatttaaatcaattttactgattgccgcctgtcacgcggcgcaggccagcgcgaccattgatattaacgctgacccaaacctgacaggagccgcgccgcttaccggtattctgaacggacagaagtcggatacgcaaaacatgagcggcttcgacaataccccgccgcccgcaccgccggtggtaatgagccgtatgtttggtgctcaacttttcaacggcaccagcgcggatagcggtgcgacggtaggattcaaccctgactatattctgaatccgggtgatagcattcaggttcgcttgtggggtgcgttcacctttgatggtgcgttacaggttgatcccaaaggtaatattttcctgccgaacgttggtccggtgaaagttgctggcgtcagtaatagtcagctaaatgccttggtcacatccaaagtgaaggaagtataccagtccaacgtcaacgtctacgcctccttattacaggcgcagccagtaaaagtgtacgtgaccggatttgtgcgtaatcctggtctgtatggcggtgtgacgtctgattcgttactcaattatctgatcaaggctggcggcgttgatccagagcgcggaagttacgttgatattgtggtcaagcgcggtaaccgcgtgcgctccaacgtcaacctgtacgacttcctgctgaacggcaaactgggactttcgcagttcgccgatggtgacaccatcatcgtcgggccacgtcagcatactttcagcgttcagggcgatgtctttaacagctacgactttgagttccgcgaaagcagcattcccgtaacggaagcgttgagctgggcgcgccctaagcctggcgcgactcacattacgattatgcgtaaacaggggctgcaaaaacgcagcgaatactatccgatcagttctgcgccaggccgtatgttgcaaaatggcgataccttaatcgtgagcactgaccgctatgccggcaccattcaggtgcgggttgaaggcgcacactccggtgaacatgccatggtattgccttatggttccactatgcgtgcggttctggaaaaagtccgcccgaacagcatgtcgcagatgaacgcagttcagctttatcgcccatcagtggctcagcgtcagaaagagatgctgaatctctcgctgcaaaagctggaggaagcctcactttctgcccagtcatccaccaaagaagaagccagcctgcgaatgcaggaagcacaactgatcagccgctttgtggcgaaagcacgcaccgtggttccgaaaggtgaagtgatcctcaacgaatccaatattgattctgttctgcttgaagatggcgacgtcatcaatattccggagaaaacatcgctggttatggttcatggcgaggtgctgttcccgaacgcggtgagctggcagaaagggatgaccaccgaggattacatcgagaaatgcggtggcctgacgcaaaaatcgggtaacgccagaattatcgtcattcgtcagaacggtgcggcagtcaacgctgaagatgtagattcactcaagcctggcgatgagattatggttctgccgaaatatgaatcgaaaaacattgaagttacccgtggtatttccaccatcctctatcagctggcggtgggtgcaaaagtgattctgtctttgtaaggggttgaaatgagcaaagcagttattgtcattccggctcgctatggctcctcgcgcctgccgggtaagccactgctcgatattgttggtaaaccgatgatccagcatgtttacgagcgtgcgttacaggtggcgggcgttgcggaagtttgggtggcaacagacgatccgcgtgttgaacaggccgtacaggcgtttggcgggaaagccatcatgacgcgcaacgatcatgaatccggcaccgatcggctggtcgaggtgatgcataaagtcgaggcagatatctacattaacctgcagggcgacgaaccaatgattcgcccgcgggatgtagaaacgctgctacaaggaatgcgtgacgatcccgcgttgccggtggcaacgctatgccacgcgatttctgccgcagaagcggctgagccaagcacggtaaaagtggttgtgaatacccgccaggatgcgctttatttcagccgctcaccgattccgtatccgcgtaatgctgaaaaagcgcgctacctgaaacacgtcggtatttacgcttatcgtcgcgatgtgctgcaaaactacagccagttaccggagtccatgccggagcaggcggaatcactggagcagctaaggttgatgaacgcggggatcaacatccgcacatttgaggttgccgcaaccggtccgggcgtcgacaccccagcatgcctggaaaaagtgcgcgccctgatggcacaggaactggctgaaaacgcatgattggcatttactcgcctggcatctggcgtattccgcatctggagaaatttctggcgcaaccgtgccagaaactttctctgctgcgccctgttccacaagaagttgatgctatcgccgtgtggggacatcgtcccagcgcggcgaaaccagtcgccatcgccaaagcagcgggaaaacccgtcattcgtctggaagatggatttgtgcgttcgctggatcttggcgtcaatggcgagccgccgctttctctggtggtggatgattgttgcatttactacgatgccagcaagccttcagcactggagaaactggtacaagataaagccggaaatacagctctgataagccaggccagagaagcgatgcacaccatcgtgaccggggatttgtcgaaatataacctggcacctgcgtttgtggctgatgagtcagaacgttcagacatcgttctggttgtcgatcagacatttaatgatatgtcagtgacgtatggcaatgctggcccgcatgagtttgctgccatgctggaagccgcgatggcggaaaatcctcaagccgaaatttgggtgaaggtgcatccggatgtcctggaaggaaagaaaacaggttatttcgccgctctgcgcgccacgcaacgagtacgtttaattgccgagaatgtcagcccgcagtcgctgttgcgacacgtttcccgggtttacgtcgtgacctcccagtacggctttgaagccttgctggcaggaaaaccggtgacatgcttcggccagccctggtatgcaggctggggcttaaccgacgatcgccatccgcagtccgctttgttatctgcccgacgcggttctgccacgctggaggaactttttgccgctgcatacctgcgttactgtcgctatatcgatccgcaaacgggagaagtaagcaatctatttaccgtgctgcaatggctgcaattacaacgtcgacatctgcaacagcgtaatggttatttatgggcgccaggcttaacgctgtggaagtcagcgatcctgaaacctttcttgcaaacggcaacaaaccggctgagtttttcacgtcgctgtactgcggcgagcgcctgcgtggtatggggtgtaaagggagaacagcaatggcgagccgaagcgcagcgaaaatcactgccgttatggcgaatggaagatggttttctacgttcatccggacttggctctgaccttttgccgccgctatcgttggtcctggataaacgcgggatctactatgacgccacgcgccccagcgacctggaagtgctgcttaatcacagccagttaacactggcgcagcagatgcgagctgaaaaattacgccagcgactggttgaaagcaaactgagcaaatacaacctgggggccgatttctctctgcctgccgaggccaaagataaaaaaatcatcctggtgccgggtcaggtagaagacgatgcctcaattaaaacaggcactgtgtcgattaagagcaaccttgagttattacgcacagtacgcgagcgcactccgcacgcttacattatttataaaccgcacccggatgtactggtggggaatcgcaagggcaatattccgacagaactaattgctgaactcgctgattatcaggcactggacgcagatattattcaatgcattcagcgcgcagatgaagtgcacaccatgacatcattgtccgggtttgaagcgttattacatggcaagcaagttcattgttacggcctgcccttctatgccggttggggtttaaccgttgatgaacatcactgcccgcgtcgcgagcaaaaattaacgatagcagatttgatctatcaggcgttgattgtttatccaacctatatccacccaacactgctacaacctattacggttgaagaggcggcggaatatttgatccagacgccgcgcaagccgatgtttattacccgaaaaaaagcgggacgagtaatacgctattaccgcaaattaattatgttctgcaaggtcagatttggctaaacaatttcacagttgactattacacaaattatttatgcaaggtaatgcactaaccgttttattatccggtaaaaaatatctgctattgcaggggccaatgggaccctttttcagtgatgttgccgagtggctagagtcattaggtcgtaacgctgtgaatgttgtattcaacggtggggatcgtttttactgccgccatcgacaatacctagcttactaccagacaccgaaagagtttcccggatggttacgggatctccaccggcaatatgactttgacacaatcctctgctttggcgactgccgcccattgcataaagaagcaaaacgctgggcaaagtcgaaagggatccgcttcctggcatttgaagaaggatatttacgcccgcaatttattaccgttgaagaaggcggagtgaacgcatattcatcgctaccgcgcgatccggatttttatcgtaagttaccagatatgcctacgccgcacgttgagaacttaaaaccttcaacgatgaaacgtataggccatgctatgtggtattacctgatgggctggcattaccgtcatgagtttcctcgctaccgccaccacaaatcattttccccctggtatgaagcacgttgctgggttcgtgcatactggcgcaagcaactttacaaggtaacacagcgtaaggtattaccgaggttaatgaacgaactggaccagcgttattatcttgctgttttgcaggtgtataacgatagccagattcgtaaccacagcagttataacgatgtgcgtgactatattaatgaagtcatgtactcattttcgcgtaaagcgccgaaagaaagttatttggtgatcaaacatcatccgatggatcgtggtcacagactctatcgaccattaattaaacggttgagtaaggaatatggcttaggtgagcgaatcctttatgtgcacgatctcccgatgccggaattattacgccatgcaaaagcggtggtgacgattaacagtacggcggggatctctgcgctgattcataacaaaccactcaaagtgatgggcaatgccctgtacgacatcaagggcttgacgtatcaagggcatttgcaccagttctggcaggctgattttaaaccagatatgaaactgtttaagaagtttcgtgggtatttattggtgaagacgcaggttaatgcggtttattattaacatcgccacatcacaaaactctttcaatgaattcaaactatgtgaaaccatcaaaaagctagactctttatgcctttctttaaacaattgagcgcacttctctttaaacctggcatcaccgacagctgttacttcatcgacgatataataatcaaacttaaatgccatgcttaaaccaaagcctaaacgcgatcgcatacctgaggagtaagttttgatcggcatatcaaagtacttaccgagttcggcaaattcttcgacaaactcaattttctctttcagctcttcttgcttcgcgtataaccgcgcaacaaattttacgttttcgcgtccggttaaacttccctggaatccaccggcgaggccgactggccatgatatcgttttattggtgatgatctttccgctatcggggcggtcaatgccaccaatcattctcagtaacgttgatttacccgcaccattacgaccaataaaggcaacgctttttcctgaagggatttcgatgtttaaatccttaaacacatagtgtcgccccgttggcgtacgatatgacttcgtcaaattctcaatcttaatcatgatgtcagcattgcctcctcacgagttcggtataacgccagaccgatgaacagggtgaccagagtgaacattgcaaggtagttcagactcacgccttcgctgatatagccaggcataactgcctcgcggcttaactctacgacatgcactaatgggttccagagtagatatgaccagtattgcttcggaatcgaatgtagagggaacatgatgcaggagatgaaatacagcggcttaagcagtatcggcaggaccttttgcatttcagggaaggttttaccaacgaccatgaatattaagccgatgccacatgaaagaatgattaacaaactccaggtgagcactagttgtaaaaagtttgttatctcgaaatattcacctgccatccagacgataagcatgagcaatatataaacagcaacgtaaatcagcgtctcaagcagtgcgcgtgcaatgatcgtatcgatgggttttactggtcgataattaaacaacccctggttcgcttcaatagcgcctacagaacgattgctgatactgctaaagataaaaaagggaatcaggccattaagtaaaaacaccgggaatgagatgtctggcatcgtgcggtgcataatgtaaccaaaaatgcccaacagtatcagcaaatgcgcagagggttcgagaatcgcccacaaatatcccagacggaacttaccaaagcgtgttcgtatttctcgtagaaataatgcctctacggtgactttctggacttcaaatccacttcttgccatttgatgatgtgatcctaatctcttcaggtacgctaccgcccttggcttaacagctaccaatacactggaggtaatgcttatttgtaactggataaaattcactcagacggtttgacctttttaatagtcgcaaaaaaatttcagcagaaattatttccgcagggataaatagatctatttccgtctcgtttcttctaatccattcttcaggcatgaatggattcggtcttctggtaatttcagaaaactggccgttttagaatgcagatttaatttctcaggaaattattttttattattactgttaactacttgattataataccccctatggattttatgcgtaacaatacctgcaatccgtttcaaaccagaacgcacgcgattgattaccaataaattgttcacaaagaaactatttccctatttaaaattcactcgtgtacttcttatttatatctacagccccctctttacagccatatttgtgatttatatcacatttaaatggtgttatttaagtcgcaccaataatcccgaaggtaattattttcgtcgattaaaatatacatcttgattattttgtgtatttattttaaccagtgttacaaccaacaccatccctcagtagatatacctgagcagacatttcttaaaatcgacgaatagtttcactggaaattattatgcttatttgaaattccctttctgattatctccaggaattttactaatttccaagcaacacaaaatacagatcacacaagaattatcctatatgttttgacctatcaattgttactcaatgatttattacaactattaataatcataatgtgtcaaaacacttaagcatctttacagtcttagaaaggtgtcgattaacgaaggctacatggtgaaaaacaggttccttcagtgttaccgaacattccgtggtggtctggagggagataaatcttgctacatcggaactcagcccggtgagctggtttgacagttccgcactcaccattgggctaagggttatcaggtggggttaaggaaatggcaatacctacccccgtccaaactccagtcgcagcacatttaccatccctggcttctcagcagcactgacatcaatttgtgtcacccgcagcgcatatttttcatccagtgcgtttaaccatttcagaaggtcattaaacaccacaggttctatccagacctgaatattctccccacgctcggctatccgcttgatgaccaccgagtgcgcggaagcgctgtcactgatgacccgcgatacctgtgcttgcgttgtcgtgccggattttcgcgccgcaataatatccggcgcagtgctcttcagtcgcgcgttcatcgccaccagctgctgcaacatcgtctcctgttgttctatccgctcgctcaacggctgccagatgaggacgtaatatacggcgcaaaacaggaacacggccgcggccagtaacatgcctttttcacgcggcgaacgccccgccaggtgctgtgccagccagtgttcgccacggcttaactggcgttcacgccattgctgaaaatagtgaataaatttatcgcgtaacatgttatttcctccgcaacgttacgccgccggaaaccgcatcaccctctttctgtaacgcgtcctgttgcacaacataatctgccgccagtgcgctacgcagtttatcgaagctggcaaagttcgcagcccgtagctggaggtgaagcgtctggcgtttttgatcaaaggtgaaaccacgcatttcgatgtcggtaagtgacgctgatttcagggtactggcgatcgctgacaattctgcgagcagccgggtatcgtcggcctgtgggcgatattttttcagcgccatcgtcacctgagagcgtaaattcacaatccgcttctgctccgggaatagcgttaagaactgtttctccgcctgggtgcggctttgcgccacctgttcgctgacgctccataacgtcacgccccgttccactgccagcgcaaccagaatcagcaatatcggcagaatcatcacccgccagcgcgcccactgttttcggtagctgacgcgaggctgccacggtccagtcagcaggttcccttccggttcgccataagtggtaatggcgggcagagccgtcactgtcaggcgttcggcgtctgcaccagcccatgcagacagttcttccggtgcaatgccgaccacggttagtgaaaacggtaaatcctgctcattgagctgtgcgcggaacatgaccggagccagcgcccgcccggcgctccatccccggcattcatcgatgcggcagataacccgttgcgcatcgccagccatatagccacaaggaatggacatccagtctggcgcgacggtagcgcgggtgatgccgtttgcctgcaaccattgcgcaatgttacgcatatgctgttggtgaatcactgctacggttgccagttgctggtcgattttcaacggggcgaaatgcagttcatcgatatcctgattcagctcttcttccagcaaggcgggcagaatagtcggtatctgcttgcgggcgacatcaggcagttcaacctgccagacgctgatccattcgccgggaatgtagagtcgaatcgcatcggtttgcagccattgctggagacgttcgtcagcaacgtcaggccagataccgtgttccacatcgggtgtacggcgctgccagcggacggtgtcggagtcgcaaagcgggaaaaaaatctcaaggatggaactcactcactttctcctgtctgatgccagagaacagaaaagtgttgtgggcccatgcggacaattaacgagttcatcgtcagttcaatctcattcacggtgatatctgaacgcagccagaagtaattcctgtccacgctcaggacggtttttagctgttttttagtacgctcatcgacgtctgcgagtagcggctgtgcaagaaactgatcgacatcttcccagcccttcgccggacgttgttgtaataacgcccgcgcctgtacagggcttaaccacgggtcaaacagcgcctcaagaatcacactttgcgtgacatccagggtgttgatgttgatttgctggcgggtcatcggcagcgcacagaccagcggtttcagtttttgataaagtccggcgtccattccctgcaccacgcgcatctcactgatatcggccagcggttgattagcggcgtaaaacggcaccgaacgggcgagatactcgctgtcttcacgacccagacgcgtctgcacgctgcggtcttcgtcaataaactcccacaggctttcggctatcagttcggcacgataagcaggcacatcgaggcgcgagatcagggcaatcagttgttgtaccgcgagcggacgcgacgccgtcgtcggctgagcgagggcattcaggttaaagcaggcctgtgcgtcacgcagagtgacggcgatttgcccctgcggcagtgggaaaaaacgagggccagaagcccacggctgtgcctgatgcacacgcttttcatttttcaggctcagactgagtgcgctcaacgccaggctttccgcactggcgctgtaccacagcgcctgctggtactcctgctggctgcgcgttcgcccaagttgttgctgcatccgcccggaaagcgtgatggtcaccagcatcataaccgccagcaataccagcaccacgaccagtgccattccgcgttttggtggtgaggtgatcatgataattgcggcccgcgtaacaaccagatgcgttcaatttcgccccattgcggcgaatgcagggttatgcgtactgccacaggaatcgcctgcactgatgaccagctctcctgccagcgcgtgccgtcgtagaactgcaaacggagcgaatccgccgggattaatttttgcgttgttggcttcacgctgcctgccgcatcggtcagtggccaggctaaccgttcgagataaccaccatgaatgcggtaaccgacggtgagcagattactgcgcggcagacgcatcaacggattaaccacgccgccgcgcacaaaacgcatcccttcactctcagacgccagcacgccagcgcccgccagtaacgctggttcacgctggccctgatcgcctcttaccggacgcggcatcatttgtgtcagatcgtggttcaaaaaactcatcgtttgctgcatgaggtttagtttttgatcgtgtccggcgacggcgctattcacgcgtgtaacgccgtttgtcacctgcagcgccatcagtgccagtgaggcaaaaatggcaattgccaccagcatttccagtaacgtgaaaccagcgcaagtccttctcactgttggcctcccacggcgctaaaccaggcgcgtcgtgactgaatcaccgacgaaaagtcttcgtgacggctgacttcaatatccactgcctggagcagcgcgttgcctgtactcagcggtgtggttcgccagtaccagcggcttcctgccatatcactctcgccctggtgcctgaccgctcgttgttcacgggtcatcaggtaaagcagtgcggtctggttttcagctacccagcccgctaccgttttttcttcaaggatttgctgattactcagcgcgccgctggcgatctgtaacaccgccatggcggccaacgcaaaaatcgccagcgcgagcattacttccagcaaggtaaatccacgcttcatggcatcccctcatcacattgattgagggataacacgccatcgtgcgccagctttaccgcccaacacgcgttttgtgccgacgcgtaaaaacgcagtgtaaacggcgtggcgggttcaaaaggcgaaaaacggatctgcggtgtcttctttttcgcctctttttgcagctccagttcaatatcgtgcagcgtcaggcgacgacgctgcagctccagcgcatattccttctgccagatatcacttccgggttgtaacagcatctgcacctgtttcggcaccgtaacctgtgccgataaccgggtcgcagaaacgggcaaccattgcccgtgacgacgctgcataaactggtaacctggcgggtcgattagcacaccgagtgtttgcccttcgatcactgccctgtccttaaactgcgcaaagcgagtcagaaaatcctgcgccgcttttttcgcaggcggctctgaagcggtcgcaaacgtctgtaccacgcccgcactggcaaggccgataaggaaaatcaccagcatgatttccagaagtgtgaatccgcgttcaggcactgattactgaaactcctgcaaattccagttaccgatatctgcgccagcgccctccccgttttcctgaccatctgctcccagggtataaacatcaaacagccctttttcacccgggctgagatactgataatcattgccccacggatcctttggcagtcgtttaatgtatccaccggtacggtagttacgggaatccgccatattggccggttgctggatcagcgcctccagcccctgttcggtagtcggataacgcccgttatccagtcggtacatatccagcgcattctccagcgccacgatatcgctgatggctttttgccgatcggctttctctttgttgcccaacaggttaggcaccaccagacttgctaggacgccaagaataacaatcaccaccatcacttccagcagggtaaaacctgcccgtggtttttgtgtgcgggataacgaattcatgtgataactccgtaaattacattccaaccatattgttcagttgcagcatcggttcgaggatggcgatgacgataaacagcaccacgcccgccatcatcaccaccagcgccggctcaaacagccctaacgccagccccacctgggtatcaaattcccgttcctggttgaccgcggcctgttcaagcatggtttccagttcaccgctctgttcgccggaggcgatcatgtacagcatcatcggcgggaacaggcgcaactccgccagcgcggcgcgcaggctgcttccttcgcggacgcgatctgccgccagcagcagttgttgctcgacataacgatttgccgacacggcggcggcggtctgaatgccttccagcagcggaacactgctggcggtgaggatgcttaatgtgcgggaaaaacgcgccgtattcagtccgcgcgcaacacgccccgtcacgggcaaacgcagcaaggttttatcccagcgcaggcgcatcgcaggatttttgagtagccgttgccccagcaccagaagccccagcaaacccgccagccagtacacgccgctggtctgtaacgtgtcgctcatggcgatgagcattcgggtggaggcaggcagcgcgtgtccgagatgatcaaactgttcgataattttcggcactactgccgtcagcaaaatagtgaccacgcccgttgccaccaccagcagtaccagcgggtagagcatggcctgcagcaggcgtgatttcagatgctgccgctgttcggtgtaatccgccaggcgattgagcaccacgtcgagatgtccggatttttctccggcagcgaccatcgaacaaaacagggagtcaaagacgcggggatgttcgcgcaggctgtccgacagggtataaccttcctgaatccggctgcgcagcgccattccgaggctttttacatgcagtttttcactttgctcactgaccgcctgtaagcaggtttccagcggcattgctgcctgcaccagcgttgccagttggcgtgtgaacagcgccaaatctgccgccgccacgcgacgatgtgcatgccgccgacgctgcaacattccccctgtcgaagcattcagccgggcttcaatgtgcacggggataagctctttaccacgcaacaattgacgggcatgacgcgcggaatccgcctcaatcattcctttggttttgcgaccattacgctccagcgcctgatagtaaaacagtgccattacgcctccatggttacccgcagaacttcatcgagagaggtttctccggcgagcactttctcaatgccgttgctgcggatacccgcagagtgttgccggacataacgttccagctccagttccccggcctgacggtggatcaaatcacgtaatgtggcgtccaccacgatcagctcatggatggcagtacgtccgcgaaaacctttgtgattacaggcgggacagccctgcggatggtacagcgtgacggttcgcgcatcggtaatccccagcaggcgtttttcttcgtcggtggcaggcgcggactggcggcaatcgggacacagcgtgcgaaccagtcgctgcgccatcacgcccgtcagactggaagagagcaggaaaggctcaacgcccatatcctgcaaacgcgtgatcgcccccaccgccgtgttggtatgcagcgtggaaagtaccaggtgtccggtcagtgaagcctgaacagcgatttctgcggtttcggtatcgcggatttcaccgaccatcaccacatccgggtcctgacgcaaaatcgcgcgcaggccacgggcgaaggtcatgccgacgcgggtgttaacctgcgtctgaccgatcccttcaatcatgtattcgatagggtcttcaaccgtgagaatgttacgcgagtggttgttcagctcctgcaatccagcgtacagcgtggtgcttttgccggaaccggtcggccccgtcaccagaaaaatgccgtgcggtttgtgtaacagctggcgcaactgcgcagtcagttcgagacttaaacccagacgctccagcgtcaggcgagcctggtttttgtccagcagtcgcagcaccacccgttccccccaggcggaaggcatggtggagacacgcacgtcaatcgcccgaccgcccagcagcagcgcaatgcgcccatcctgcggtacgcgtttttcggcgatatccagccgtgccatcaccttaatacgcgataccagcagcgaggccagtttgcgccccggacgcagcatttcatgtagtgtgccgtcaacacgaaaacggatcaccagactcttttcaaacgtctcgatgtggatatccgaagcgccttctttaatcgcctctgccaacatggcgttgatcagtttgatgattggcgcatcgtcgtcactttccagcagatcttccgtttccggtagttcttctgcgagagtaaaaaagtcctcagcagaaccgagatcttccatcagctggcgggcctcggaagagtcccgctgccagaccgcattcagccgctgttcaaattcggcctcgtcgatttgcctcagcgtaaaagacgcgttcagcccccgctgcagctcctgcaaaacagagagcgacaacggatgaacatggaggatctccagcgacgcttcgcaccatgccaccaggctaaaccgacggctgaaactgtagggcagacgcacggtgttagcggtggtttcctgtgctacaggcaccattaacgcgttctcccggcattaaggaacgcgcgaacttctggcggtagagcctgattttgcgctggcagtaccggctgcgcggtgtgcggcatcaggctcaagccttgctcatcgcgatagatctgttcggcgcgcatatagttatatttgcgctgcgacacgccgtctgccgccataccgtcacgcagaatggtcgggcggataaataccatcaggttacgtttttcttttttatccgccgtcgatttaaacaggttaccaatcaatgggatatcgccaagcagcggcactttcgccacgctttctcccgcctgatcgtccatcagaccgccaagcacgatcagctcaccatcgtttgccagcacggtggttttcagtttgcgctcgccaaacacgacgtcgagactggtctgtccttccaccttcgacacttcctgctcaatcaccatctgtaccgcgtttccttcgttaatctgcggcgtgactttcagcatgatgccgacttttttcctctctaccgtattgaaaggattgctgttattagagccaacagtagagccggttaataccggaacgtcctggcccaccatgaagaaggcttcctggttgtccagcgtggtgatactcggcgtggagagcacgttcgagctggagtcgtttttgaccgcctgtaccagcgccatccagtcgcctttcaccacgccaaccgccgtaccgctaaagccagaaagaagctgagcgagcgtggagagatcgccgttagtatccgggttaatggtggtagcgccgttttcactgatcaccgtggagcctttctgcggttttgcctgagaaatggctgcacccagcgtgccaatagggatctgcgtaccgttagcaaactgcattaatccggcatctttcgacgcccactgcacgccgaaattgatattgctaccttcggcaacttccacgatcaacgcctcgacgtgcacctgagcacggcgaatatccagttgttcaatcacgctttgcagcgactgcatgatgtcctgcggcgcggtaacaatcagggcattactgtgtttgctggcggcgatggagacaacctcacgcccgctaccgacggtgccttccgcctcttctttagccgccgtgagcgtgccgctgacctgcttcagtacatcgaccagatcttcggctttgctgtatttgagatagaaaacctggctgttgccgctgcgttccatttctgagtccagccgacggatcaggcggcgcattttgtcccgcgtggccgggtcaccactgacaatcacactgttggtgcgttcgtcggcgacaatttgagatttcagcgtcgcaggctggttctcgccgctgtttttcgtcaggctttccagcacgcgggcgatttccgaagccgaggcgttatccagcgggatcacctcttcggtgcgattacccgcatgatccacgcgctggatcacttccgtcaggcgctccacaactgaggcgcgtccggtaagcataatcacgttggagggatcgtaattaacaacgttgcctgagcctgcgctgtcgatcatctggcgcagaatcggtgccagctcgcgtaccgacacattacgtaccggcacgactttggtgaccatttcatcgcccgcgtagttgtcgctgccttcaccaaccagcggcagcggctcgactttcgcggcactggatttcaccaccttcagcacgtcgttttccatcggtacgacggcatacccctgtgcttccagcaggttaaggaatagctggtaatactggcgttcattgagcggggtcatggtgcgaatactcactttcccctgaacgcccggccccataatgatggttttattaaggttagcgccgacggtttcgatgaacgatttcaggtcggtatctttaaaattagcggtgaaagtggcttcttccgcccagaccggtgaactgcataatgccgctgccagcaccagcgccagtaaacgcttttttgttttgaggccagttgtcttcttacgccagaccgacaacgtcatatcacgccaaaacacgatgaatgattctcctggattaaatgcggttagcgcagcgcgatggaaatgtcgtagcgcgcacccttgcgtaaaaccgtaagttgaatggaatccattgaaggtaactgccgcatcagagcaatcattgctcgtggatcagtgaaatcctgctgatttagcgcaatggcgatatcgccttccttaaaaccgctggcatcgaacagagaacgatctgcccccggtttcactgcataaccgacaatcccttccttacgcacaggcgtaagctggatatagttaaaaattttctgcggatctttcgccagtgcctgacgcacggcagccgggatctcaactggcgcactggcagcaggctcagcaacagcttgctttgcttcgtcgctgacggcttttttgctggtcacggctttggtgggacgcttctcttctgccagactcagacgttccattttcccctgatagcgcagcatcacatggtcacgattaatttcctcaatcaccgcgttgtgagagccaagccgttcgccctgtaaatagacctgctgtttgccgccttcttcaatcaccgcgccgggtctggcaccaaaggcgatcccgcgcagcaccacattaagacgcgtttctgccacaggcgcaggttcgggttgttttaccggtgcggcgacgggttgatatttgccaaaccagttttgttggctgactaattgcacgtcatttttatcgaacggttttgcatccgcacggagcggtttattcgccgatgaggaaaccgccgtatattccgcagaaaaggagaaatagcgccagagtgaatacgccatttttgcagaaataataagcagcatgagccagaacatcccgcgcaccatttttcgcagatgctctttgtctgtattaagagattgtctctggctaagagtgtgacgaatttttgtcagcaactgaatgagataaattcgtgcgtcacgaaaaacaacccgcgccaatttatatctacccgacgttatgctttgactattccacaggtggtacgatccagtttccgctgatactggtttcctgtacgtgtatcattaatcgttatgctgtaattaattccctcggtaatcattaatttcaccgtcgggtcagcgcacatttgtcgttgatagctggttaaaaaggcatcaggtgtctgcgtggtctgagcacccgcttcgctgataatggtcatttttaccgtcgtgccgctactttgcgccagcactaaggtatatcccgcagatttaatcggcaggttttggctgatattttgcgcctgttttttcgccagtaaactggcattttcattatggccggcacagccacttaataatcctgtaacgctcaacaatagcgatattaataccctccctggcatttgttttatcgacatggtaaataatctctaaggttattaataagagttaaaatgtcactttgataatgacgtggttatcattaaaacaatgcctgtagataaagtgttgctataccgcccagacttaaacacggtccaaaaggcagtgtggttgatcctctttttgtaataacggcatatatcaggccgcagcatgatgcgattaaagcaacattgggtagcgacaacggccccacccagccacctaacgcagcgaaaagtaatacatcgcccatgcctaatgcttctttacgcagaactattccggctatccagcgcagggagtaaaaagtgataaaccccaccaggacgccggtaactgcgtcttgtagcgttaacggactctgttgcgcccatgccgcaatcagcccggtccacaatacgccctgagtaaaaacatcgggcagccattggttatcgaggtcaatgacgctcgcggcaatcagccaggcggataatatcatcaccgccagcccccatccactttctggccacaccagactcgccagcaaaaaagcgagtgccgtcaataactccaccagcggataacgcttgctgattttcgcctgacagtcgcggcagcgccctttgagcatcaaccatgagagcagcggaatattgtcacgaacgcggatggtctgctggcaatgcggacagtgcgagcgtggcagcgccaggtttatttttgactgcgtactcggcatttcaccgtgaaactccgccatttgttggcgcagcatgatggggtaacgccaaatcaccacattcaaaaaactgccgatgatcaatcctccgacggttgccagtatgggcatccccgcggagtattgctgaaaaacatcaaaaagcatggttaaaggttgtttgttgtaacttgccggatgcgggcctgcgggtgtatgccatatggctttcctccaggcccgatgcgccttatttcatgccggatgcggcgcgagcgccttatccggcatacaggcttactcagctgacatcttatgctcggtaacctgattaatggtttccggcccttgctgcggtttcggcagattaagcgccgccagcgtctcgtaagccgactggctcacaccgccctcgaagttcatctcgctcgctcccggtaactggtaagcattcgcgcccggattccatttcttaaagaactccgaaagatccgtctgagcgacccaggaggcacacagcatcagcttgtcggcagcgttaccgttggattcggcacagtaatttctttcgccaaacttggttttgccaacatcatcgccgcgtgctttacggtgcatcaactggaacaggttccagcctttcatcccttcacgatcgctgtagaactcaggcaggtcaccttctggataccactgtttgatatcaaagtttttctctgcccactccttcagctgcgcgtacatcagcagacggtcgcccgcaccgccgcgcgcccatgcctgaccgttgctctcctccagatattccggcgcgacagtaatatcgtcagcgacacggttcatcttgccgagatagcgatcctgcatgtacagcgccagaacgttgttcgctacttcagttgcgccaggaacagtcagcggcgtttcggcggcgttgtgccctacttcgtgccagatcaaccagtcgttcagcggcgtcgtcggcagcgtggtgctgttcgtcgagaagctgctgttcattaccggataacccgagtgcgcatcaccgatggagatctgcacatcgttggtgaaacgatgcttgtgccccgtcaagtttttataggtaaacatccggtgcttaccgtcttcatcattacgaccgtagaagtcattcatcgagctggcaaaggtatccagatctttagcgaattctgctacaccaccagtgaaattgctggcctcaaggttcttcttcggcgtggtataaacgaaagcgtctgattccagctcgcccagcggcgcaggggagttcagagcgtttttccattcgccgtctttatagaacggcgcttttaccacaccagtaaaggtgaattcggctgactcattctttgggctgttgcccttgatataaatcagaccaccgtaaggcaccttgaaggtcaccttatcattggctttcagatcataggttttcgtcacttttggcggacggttcagcgcgacttcatgcttctcgcgtccggtcagatcgtcggccagcgccacggtgacagtcacaggaactgatgcagaagactcaatggtgacctctttctgagccggagcccacaggccagtagactgcatgttacccgcaaaccatttggtcggattggagtacaggctgatggtttcagtaaccttctcaccttctgccgataccgctcccggatacttctcgacatcaactttgatgttcagatcccaccaggaacgacccagcatcaggcgcgtcagcggtttttccatatagttgagcggatagctcgggttcatcatgcccgctttattaacgctcttctcgccgtagatcatgttgttatcgaccagcgattttttcagctcatcagaacactgcgtgccgccagtataggcatcgttggcgtagcagttcaggaactcggtgaacgttttaaagcccagctcgtcatccttgtcgttttcatagcgatattcaattttattccacagccagaccgacacgttctggtacagacgttccagatcgacgctgctcagacgctcacctttgcgaccattggtccggaagtagagctcatgctgatacagacgctgaatgttggtgcctaaatccgcagcctgcaccatcgcttttgccgtgtcggcgttaaggcttagttgcgtatactgtggaacatacatgccaccagtaaccggaacccccgtgccaggacgatattccagacagttgacctcgtagtggtaagttgggtccttacactcctttaatccaggaaacttctcaaagatttttgccttcgcagccttcagagaatcctctgttttatgatcggcctcatcaataaaggcataacgcgtttcctgtttgccatctacatcttccagccagctggcaacttccagcttcggtttgtcatcaggtttgttttctacctgatatttccacttaacttcccctgtcttactatcgatggtgtacggcagcgcaccatctacggcaggataacgttcatagacccaaatgcccgttgcgcgctgctgacgaacgcggttcggatacccttgcggatcgttatttactaccgacttgttcagtgccatcgacagacctgcggcatcaagcagacgtacaaagccagacgcgctctcttccttaagattgctcatcacgttttccatgatcagcaccgatccacctttgttcagataggcgatcagatcggtcacatcctgctgagtcagcttcggtttgctggtatctgctcgcagcgggattgcataaggatcgttaccaacctgagtcacatactcaaagccgttgaggatcagcagcggcatttcctgcgggtcgagatcgccatagctacttaaatgctcaacagagatacccgcaaaatccggatgaaagccgaactcagcgctgtttcctgtaacctgaccatgacgtttgaaatagacagtatccaggttggtgcctacggtcatgctggctttcgcgtccggcgtccatttatcgtcggacagatagcgcaacacgttctgcataaagtgcttcatatcattagaatcactgttacgcgtacactgaccgtttttatcaacaccgccttcccagctgtaaccgttcggacaacgcaaaatgctgttgtagtgcgggttaccgataaccatcagtttgccctcaccgacttgccccagcgaaataaacggcaggttaaaggtggcggtatcgcgcgtaacgttttccggctcaacgagagaaggcgcttccgtaatgtacgccagctcgtttttatcccaggcgcgtttttcgccaaacgccagccagtagtttttatcattacgcgccatcagaatcgggaaggccgcgttggagatattcaccactgcctgaccgcgcgcattaccggtactgccatagaagttggtagagtcatggaagacgtggaatttcgtcactgatttgtaatctttatccacaccccacagcttgttgataacgccctgaatctgaccttcgttaacattgcgtgctgtcaacgagaaccaacgctgagagttgcagcccccaagggagtcacaaatcgccgtatcaatctctttagcctgcccggattcaaactgctcaagaaattcgtttgtccgctcaaaggtttgatcgccttcgctcaacgcctcgccattggataacgagagattgataatctcgttgattacgttgggatactcggcaaagaccttgcgcactacgtccggcacttcacgctcatcattttttccggcctgggagtaacgatgaataagctgatcaatattcgcgccgcgaacttcgtcacccagttcagtcaacgcaatggtcgacttattgccgcgcactgagcccagttcaaaggtgtcgataccaaaggagatggtttcgccccagctgaagttgaatttgccgttttcgccagttacgccacggcctgagctggtgtagtaatttacgccaaccacaccattgcccatgctatctaccagtcggccttcggagagaatgatttcagtgggttgatactgataaaactgttccgcgttagccgacacgaaggaagcgttcagatccggttttgttcccggcgtggtgacgggcacaaccggtgaagtatgagtggatggcgctttatcggtcgcggcattgttttccacctcttcattgaccagctttttgaactcttccggtgccagatcgatttgcttatacagcgagtcgaaacgtttactctcgatcactgaggagaacgtcaggcaaacctgttctgtattcgccggacagctgttactggacgttaccagcgaaaccgcattgcttttcttgtcatcggaagctgccagttcttgcgcgtcctcaagactaaacgacactttttcaaccgcacgcaggctacgcgcagcttctgactgggtgtcgaaggtagcaattgtcgtgttacccgccacgcaagtaacgtcctcaccaggtgtaaatgtaaagccatcgctggattcaccattacaagtagcaccagttacccgctggcttccgcccagggtcagataacccgttttcgtaggaacaggttctggctccggttctggctcaggatcaggtgtcggttccggcgtaggttctgggtccggcgttggctcaggcgtcggctccgggtttggtgttggatcaggtttcacttccggcaaagaccctgttccagaatctacaggcggcgtatcggaggaagatccggagccaccgccatcacaaccggctaacagggttgcactcaaaatagccgctaaaagcgatttcttatatttaaatttcttattcattaataacgcaagtgacaaaacaaagttaaaagattcgtaaccggggaaatagttttatgctttatcttctttaataacttcctccattcttaagaaaacggcatcattgatagaaaaacaggtgaaatttataagaataacccctattcgatgtctggctggttatttttacgaaatttcaataaacaaaaaattaacaacttttcacaacgtaactatataaatttgttggtagttttaacgattaagattgcaaaagcaacagatagaacggtgtttgctcatcaagcgaacataattaatactgacttgttttgcgtgataaaaaaacagatgttctcacgcttttaattatttagcaggttatctgaacgcgaaacattattgccacatggataataaagcgggaaataattttccattaataagacagagtaatgtaaacgaagccggatgatattaacgatcatccggctttattaacttacgaaactaacatcccggtaaacacatacgcctgcaacagcgtgataatgccgatcacactggcaaagatcagactgtgcttcacggtgtagcggaacagttcagattctcggcccaccatgcccgtcgcggcgcaggccacggcgatagattgcggagaaatcatcttgccagttacgccgccgctggtatttgctgccaccagcagagtgtcagagacgttgatttgctgcgccgtggtcgattgcagtgaaccaaacagagcgttagaggaggtgtccgagccggtaaggaatacgcccagccagccgagaaacggtgagaaaaacgggaacatcacgcctgtacctgccagtaccagcgccagcgtggtggacatgccggaatagttggtgacgaaggcgaacgccagcaccatgccaatcgacaatatcggccacttcagactaattagcgtttcggcaaagacgccaatccctttcttgatgcccatgccgaggatgaagatagagataatcgccgcaataaaaatagcggtgccgccagccgagagagggtcgaatttaaacaccgcatccattggcgttggttgggcgacaatgggtgccgctttcaacacttgttgatgcaaatgagggatctggaaattaatcaccagtgaataaaacgcgccgcccggagcaaataacgctttaaacggcttcatggtccagatggtgaccagcaccgttaagattaaaaacggtgaccacgcacgaatgatttgccccagactatattctgaaggcacgggaccgccagaagatggtttattcaccaccatcgcacctgcggattgtcccatgctgattgccgtttcggtatttttcggccgccagactttaaggaataaagcgagtgagacgatactcaccagcgccgaagtaatatccggcagttccggaccaatatagttagaggtaaagaactgcgtgacagcgaagcttcccccagcaaccagcgccgctggccacgtctctttcacccctttccagccgtccatcattgctaccagccagaacggcacaagaaccgacaggaacggtaactgacgtcccgccattgcgccaatgtggaacggatcgattcccgttacctgaccggcgaccagaatcggcacgcccaacgcaccaaacgccaccggcgcagtgttggcaatcagacacagccccgccgcgtataacggtttgaagcccaggcccaccagcagcgcaccggtaatcgccaccggcgcaccaaagccagccgccccttccagcagcgcgccaaaggagaaaccaatcagtaacacctgcaaacgctgatcgtcagtgatggagataaccgagctgcggataatatcgaactgaccgctggcaacggttaatttatagaggaacaccgccgcaacaataatccacgcaataggccataatccataaataaagccatagcccgcagcagcaaatgccatatcaatcggcattttaaaggcgaatatcgcaatcagaatagataatataagggttattgctccggcgacatgtcctttcagacgtaataccgcgagtgcaacgaagaagaatattatcgggatcagggcgaccagagcggatagccccagtcctcccatcggcatatacatttgggtccaggtaaccatatttttcagtctcttattatctttatatgcttgatatacttaaggttgtaataagcaaaagaggactgaactgtaaaatataggcgttatactttacagcaacagtacgctgctaacgcaattgctacctctggcataacaagtatatcgggtaagggtttctgttccgcacacgcaggcgcagaatatcgttaagatgtccatattgttgttttaggcccgctagtaatgcgctacgggtatttaatattgttaaaccctgataatcgctccggttatttccgggataaatgtactaccgcagttactatcatagccccgacaataaaacttgccggggcttttttgacgctattaatgactttctttttcgcgtaaacgccaggcgtgtaataacggttcggtatagccgtttggctgtttcacgccgaggaagattaaatcgctggcagctttaaaagcacacgagttagcgaaattccccgacatcggacgataagccggatcgccagcgttttgctgatcaaccactttcgccatattctccagcgacgcctgcacctgttctttggtcagaatactgtgacgtaaccagttggcgatatgctggctggagatacgcagcgttgcgcggtcttccatcagcgccacgttgtgaatatccggcacttttgaacaaccaatcccctgctccacccaacgcaccacgtaccccagaatcccctgcacgttgttatccagctcttgttggatctcttcaaccgaccagttagcgttttcagccaccggaatagtcagcagatcgtccagcagcggttcaaattcagcattgaactcgctctgggcaatgttggcctgcacgctctgtacgttggtttggtggtagtgcagcgcatggagcgtagcagcggttggtgacggaacccaggctgtgtttgccccggcacgcagttggtcgcccttctggctgtacatgtctgccatcaggtccggcattgcccacatccctttaccgatttgcgctttaccgcgcagcccacagaacagaccggaaagcacgttattacgttcgtaggctttgatccacggcgtcgatttcatctggtttttacgcagcatcgggccagcttccatcaccgaatgcatttcatcgccggtacggtcgaggaaaccggtattgatgaacgccacgcggttacgcgcctgagcgatacagctacgcaagttcagcgaggtccgacgttcttcatccataatgcccattttcagggtattcggtgccataccgagcattgtctcaatgcgggtaaacagtttgttggcgaacgccacttcctgcggaccgtgcattttcggtttcacaatatagacgctgccagtgcgcgagtttttctgcacttttaaatcatagagggcaatcgcgccagtcatgacgccatcaagaatgccttccgggatttcattgccttcgctgtcccaaatcacaggaatggtcatcaaatgacccacgttgcggataaacagcagcgagcgtccgtgcagagaaatttcagagccatcggcggcggtgtaatgacgatcgtcattcagtttacgcacgatttgccgaccgtttttttccattttctcttgcagagtcccctgcatcaggcccagcaggttgcggtacagcaggattttatcttccgcatcaaccgccgcgaccgaatcttcgcagtcgagaatggtactgatggccgcttcgacgataacatcgttgatatgcgccggatcgtctttgccaatccgcccgttggcatcaatttgcagttcaatatgcagaccgttatttttcagcaaaatgcaggtcggcgcagcggcatcgccacggtaaccgacaaactgcgccggggtacgtaacgtggtttctttaccatttttcaactggatgcgtaattgtttatcgaccaccttaaacgccaccacatcctgatagctgccgttttccagcggtagtgattcatcgaggaaacgccgaacccaggcgataacctgctcaccacgctgcggatcgtagccgctgaccatcgccccttcctgcgggatgatgtcgctgccgtataacgcatcgtacagtgagccccagcgagcgttcgccgcgttcagcgcgtagcgggcgttcattgccggaaccaccagctgtggccccgcctgactggtgatttcgctgtcaatgcccgtggtttccaccgttacgcgctccggttgcggcaccaggtagcccagttcacgcaggaaagatttataggccgctttatcttttaccggccccggattgctgcgatgccactcatcaagcgccgcctgaatgcgatcgcgttctgccagcaactgacgattttctggtgccagatcgtgaacgatctcatcaaaattgcgccagaacgccgcagcgtccaaccctgttcccggtaaaacttcttcatccacaaaacgtttaaaattggcgttaatgcgtaaacggccctgggttatggtttgactcattgtttctctcctcgttttcgcttatttcgccaacaccgctgctgccgctttcgcgacctgcgcatcctgtgctccggttaaaccagaaacgcccacggcaccaataatttgcccatccacaacaaccggtacgccaccttctagcgacgttaataacggcgcagtcacgaacgcggtacgtccgttgttcaccatctcttcataccccttagtttcacgacgccccagcgcggcggtacgcgctttctcctgggagatgtaagccgcaatcggcgcgcaatcgtccatgcgacttaacgccagcagatgaccgccgtcatcggcaacagcaatggaaacagaccagttgtttttctgcgcctcttcctgacctgcggcaataattgcactcgccatttgctggctaagaatgactttagttttcattttgttattccttttcaagggcttgttctacaatttcaatccagtgacgcacagaggtacgaccggcgctcgccagatgcgtctggcaaccaatgttggcggtgacgatcatttccggtttgccgctttccagcgcattcattttgttatcccgcagctggcgcgccagatcgggatgcgttaacgcatatgttcccgctgaaccgcagcacagatggctgtcgggaacgtccgttaaggtaaatccaagacgaagcaacactttttccacttcgccgttcagcttttgcgcatgttgtagggtacacgggcagtggaaggccagttttttatcgccgcgaattgccagtttttccagcggttcctcgcgcagaagttcgactaaatcgaccgccagctcactgacctgacgcgctttatcggcatacaacgcatcgtttttcagcatctgcccatactctttgacaaacgcgccgcagccgctggcagtctgcaaaatagcctcggcacctgcttcaatcgcgggccaccaggcatcaatattattgcgcgcccgcgctaaccctttctcttgcgcattaagatgatagtccaccgcgccacaacagcctgcttcgttagctggcatgacgctgatccccagacgatccagcactcgcgcagttgccgcgttggtgttgggcgaaagcgtaggctgggcgcagccttccagcattaaaacccgacgcttatggcgcagcggtggacgcggtttagctttcaccgtttcagcaggcagttttgctctgacctgttccggtaaaaacggtcgcagcaccagccctacctgcgtcagcgcacggaagaccgccggacgcggcactacctggcgcaatccttcgcgcagcattcgctccggcagtgggcgtttcactttctgctcgacaatatcacgcccgatatccagcaaattgtgatagcgcacaccagaaggacaggtggtttcacaattgcggcaagtgagacagcgatcgagatgctcctgtgttttaagcgtgacgtcgttgccttccagcacctgtttaatcagatagatgcgcccgcgcggcccgtccagttcatcgcccaggagctgataggttgggcaggttgcggtacaaaatccgcagtgaacacaggcgcgcaggatgctgtcggcttccagcgcccgcgcgttctgccgcatctcttcggttaattgggtttgcatagcctgctccttaaagctccgcgtacatgcgaccgggattaaacacgccgcaagggtcgagctgctgtttaagctgctggtgatagcggaataaaggagccggtagcggggcaaaaccaccatctccggcactaaagcgggtcgcatgaccgccagcgttgcgggcaatgcgatggatttgattgtcatcggctgtcgatttcagccagcgtaacgccccgccccagtcgatcagttgctcgccgggtaaatccatcatcggcgcatcgctgggtaaggaaatgcgccataaggtacctggtaacgagaagaacggcagttgttgttcacgcaattgctgccagaactgacccgcaacctcttcgccccccagcagttcacgcgctgcttttaccgatccttcgccgccctcaaggcggatccacaacgcattgtcgaagtaacataagccactaatgggtaatggctggagttgccactgggcgatttcattcatggcttcttgcaggctgatttcccgacgcagactcagggtggcgcgtggtcgcggtaacactttcatcgagatttcagtgagcacacccagacaaccgtagcttccggccattaaccgtgagagatcgtatccggcaacgtttttcatcacttcaccaccaaaacgcagatgttttccagtgccggtaatgatgcgcgtgccgaggacaaaatcgcggaccgaaccactccacgggcgacgcggccccgccagcccgcaggcgatcatcccgccccaggtagcttcttcaccataatgtggcggctcgcaggggagcatttgcccggcgctctccagcgccgcttcaatcgccaccagcggcgttccggcacgagcggttatcaccagctcggtcgggtcgtaattaacaatgccgcgatgacaacgcacatccagcgtttgcccggtgacaggacgacctaaaaaggctttgctattgctgccctgaatcaccagcggcgttttatcgctaatcgcctgattcacctgctccagcagcgcctggctgtaatcacactcgcgtagcatcagaaacgctccagttcagggaaaggtaaatgaccgtgatgcacatgcatggcaccaaattcagcacagcggtgtagcgtgggaatgtttttcccagggttcagcaaaccatcggggtcaaacgccgccttgaccgcatggaaggtcgtgatttcatcgctgttgaactgggcgcacatttgattgattttttcgcgcccaatgccatgttccccactgatgctgccgccaacttcaacgcagagttcgaggatcttcccgcccagctcttccgcgcgggcaaattcaccgggttcgttggcatcgaaaaggattaacgggtgcatgttgccgtctccggcatgaaagacgttggcaacgcgtaaatcatattgctgcgataaacgggcaatgccttccagtacgccaggcagcgcgcggcgtgggatggtgccatccatacagtagtaatccggggaaatgcgccccactgccgggaatgcgttcttgcggccggcccagaaacgtacgcgctctgcttcgtcctgtgccagacggacgtcagtcgcgcccgctttcaacaagatgtcgttaacccgctcgcagtcttcctgtacgtcagactccacgccgtccagctcgcacaataaaatcgcttcggcatcgacgggataaccggcatgtataaaatcttccgcagcgcggatcgacaggttatccatcatctccagcccgccggggataatgccattggcgatgatgtcaccaaccgcaagtccggctttttctaccgagtcaaagctggctaacagcacccgcgccacgggcggcttcggcagcagttttaacgtcacttcggtggtcacgccgagcataccttccgatccggtaaacagcgccagcaggtcaaaaccaggcgaatccagcgcgtccgatcccagcgtcagcgcctcgccatccagcgtttgcacttcaattttcagcaggttatgtacggttagaccatatttcaggcagtgaacgccaccggcattttccgccacattgccgccaatcgaacaggcgatttgtgaggacggatccggcgcgtaatagagattatgcggcgcaacggcctgggagatcgcctggttacgcacgcccggctgcacgcgcgcacggcgaccaacggggttaatgtcgaggatctctttaaagcgcgccatcaccaacaacacacctttttccagcggcagcgcgccaccagaaagcccggtgcctgcaccacgggtcaccaccggtacacgcaggcggtggcagacagccagaatcgccgtcacctgttccatctgcttaggcagaacaaccagtaatggacgcgtgcgatacgcgctcaacccgtcacactcgtaaggaatgatctcctcatcggtatgcaggatctcaagtccagggacatgctcacgcagtgccatcagtaccgatgtgcggtcgacatcgggtaaagcgccatcaagacgctcttcgtacaagatgctcatgagtaggcttcgctttgttgtgttgtgtggcagctgattttttcgcgctgcttctgtgaacagttattaagcgggcttttcgttttcgtctatctctttagctaccggtcagaccattttttttccagctctgtgaccttgtcttggttaacttaatgttaaattgatgtaacataatcacttacgtgatgtgcgtgttttgcgagttaagaacagaaaaattggtcctacctgtgcacgaggtccgggaatgaaagatgaacgtcgccctatttgcgaagtggttgcagagagtatcgaacggttaattatcgacggcgtactgaaggtcggtcagccgcttccctcggaacgtcgactgtgtgaaaagctcggcttctcacgctccgcactgcgtgaagggctgaccgtgctgcgcgggcgcgggattattgaaacggcgcagggtcgcgattctcgtgtcgcacggcttaatcgggtgcaggacaccagcccgctgatccatctgttcagtacgcagccgcgaacgctgtacgatctgctcgacgttcgcgcattactggagggcgaatcggcaaggctggcggcaacgctgggaacccaggctgattttgttgtgataacccgctgttatgaaaaaatgctcgccgccagtgagaacaacaaagagatttcgctgatcgaacatgcgcagttggatcacgctttccatctcgccatttgtcaggcttctcacaatcaggtgctggagtttacgctgcaatcattgaccgacctgatgtttaattcggtgtttgccagcgtaaataatctctaccatcgaccacagcaaaaaaagcagatcgatcgccagcatgcgcggatctacaacgcggtgttgcagcggctgccgcacgtcgcccagcgcgcagcacgcgatcatgtgcggaccgtgaaaaagaatctccacgatatcgagctggaaggccaccatttgattcgctcggcggtgccgctggagatgaagcaggggtgactgccatcaaatctgcttttcatacaatcggtaacgcttgtacggctccgccccaatgcgttccagcatgttattcatgcctgtattggtttcgaggatccatgacatctccagcgcatcgatcttccggcgggcaaacggatcgcgtaaggcttcaatcaataacaacgcaatcaccgggccgatgcggctgaactgatactcgtcccgcacgcccatcagcggtactcgcgcagttcgcacaccgctgacttttaaacgccacagcaattttgcccagccgaagggaaagagcgatccgttcagatcggcaatcgcctcgttgatgtttggcaagccgacaataaacgcgcagggtgcagaatcaatctcagcgatgtagatcatatcgtccggcaccagatatttaagttggtcgcccatggtcgcgaattcatgttcggtaaacggcacaaatccccagttgtgctgccagccagaattgaaaatctcacgcaggatctgcatctcttcggcaaaccgctggcgattgatgcagcgaatggtcaccttcttacgcacctgatccatcagtttttttagcgccggagagaaagtgagatcggttcgctgcatccaccacgccagtaaatcaatgcctttgtgataacccaattgttcaatatgcgcggcataccacggtttaccgtgcggcatcatcgcacagggtggtgtatcgaaaccttcaatcagtaatccgctttcctgattgatattcaggctgaaaggaccgctgatcttacttgcaccttgtgacttcaaccacgcttccgctgcgccaaacaacgcggcaaaaacctgcggatcatcaatggcgtcaatcatgccgaaatgaccggtatctttgccgtaacgctcgcggtgcaaggtatctatttgcgcggtaatacgcccaactatctgccccgctttttttgccacccacgcctgccagatgatatggtccgtccccggatttttcgcagacaaatgctcgttgcgttcaatgaataaagggggtatccagtttggatcgtcgggataaagtgatgacggaaaagcgataaatgccttaaggtcatttttattaattactttttcaattttaatcatcagcagatcgcattccatatctctgtggataacaaataattaacgatgaaaaacaggttgcaacagcaacgaacggcatcttaataatcaacaccatgaatacaaaataagaataaatattatttattaatgattacgataagatcacagcctacgaagaagcgccacaatgccttttagcgatttaatgcggtcagacaaggttcattcttaatacattcataaatcaaatatcattcacaataaaaacaacaaaacaaaacctattatttaaatcaatgttcaatatcgcaccgatgaaaatactatctcatttatcttttatgcctatataatccaccgcattattgtcattttatttttgatatccaattttttcgtggtgtatatgtctaataaaatctttacgcattccctacctatgcgctatgccgattttccaacgctggttgatgctttggactatgccgctctgagtagcgctggaatgaatttttatgacagacgttgccaacttgaagatcaactggaatatcagacgttaaaagcgcgtgccgaagctggtgcgaagcggttgttatcgctgaacctgaaaaaaggcgatcgcgtggcactgattgccgaaacgagtagcgggtttgtagaggctttttttgcctgccagtatgccggcttagtcgccgtcccgttggcgattccaatgggcgtcggtcagcgggattcctggagcgccaaactgcaggggttactggcaagttgccagcccgcagccattatcactggtgatgagtggttgccactggtcaatgccgcgacgcataacaatcccgaattacatgttttaagccacgcctggtttaaggcattaccggaagccgatgttgcgcttcaacgtccagttccaaacgatatcgcctacctccagtacacctccggcagcacccgttttccccgtggcgttatcattactcaccgcgaagtgatggctaatctacgtgctataagccacgatgggattaaattacgccctggcgaccgctgcgtctcctggctgcctttctaccatgatatgggactggtcggctttctcctgacccccgtcgccacgcagctttcagtagattatttgcgcactcaggattttgccatgcgtcctctgcaatggcttaaattgatcagtaaaaatcgtggcaccgtttccgttgcaccgccgtttggctatgaattgtgccagcgccgcgtgaatgaaaaagatctcgctgaactggatctttcctgctggcgcgtcgctggtattggcgcagaacccatatccgcagaacaactccatcaattcgctgaatgtttccgtcaggtaaactttgacgataaaactttcatgccgtgctacggactggcagaaaatgcgctggctgtcagcttctctgatgaagcctgcggggttgtggttaacgaagtggatcgcgacatcctcgaataccagggtaaagccgtcgcgccgggtgctgaaacacgcgccgtatcgactttcgtcaactgcggtaaagcgttgcctgaacatggcattgaaatccgcaatgaagcagatatacctgtcgcggaacgtgtggtaggccatatttgcatctccggccccagcctgatgagcgggtactttggcgaccaggtttcgcaagacgagattgccgcgacgggctggttagacaccggcgaccttggttatctgctggacggttatctgtatgtcaccggacgcattaaagatctgattattattcgtggccgtaatatctggccgcaggatattgaatacattgcggaacaggagccggaaattcattctggcgatgcgattgcttttgttaccgcccaggaaaaaatcattttgcagatccagtgtcggatcagcgacgaagcacgtcgcgggcagcttatccacgcgctggcagctcggatccaaagcgaatttggcgttaccgcggatatcgatctgttgccgccccacagtattccccgaacatcctccggcaagcctgcccgtgcggaagcgaaaaaacgttatcagaaggcttatgctgccagtcttcatgtgcaggaatccctggcatgaatcaaactgtcgcggtgacgggcgctaccgggtttatcggtaaatatattattgataacctgctcgcccgcggctttcacgttcgcgcattgacgcgtactgcccgcgctcacgtcaatgataatctcacttgggtgcgcggttcgctggaagatacacattcgcttagcgaactggttgccggagccagcgcggtggtccattgcgccgggcaagtgcgcgggcacaaagaagagatttttacccgctgcaacgttgacggcagcctgcgcctgatgcaagcggcaaaagagagcggcttttgccaacgttttctgtttatctcttcgctggcggcgcgccatcccgaactctcctggtacgcaaattccaaacacgtcgccgaacaacggctgactgcaatggctgacgaaattacgttgggcgtttttcgcccgacagccgtgtatggtcccggcgataaagagttaaaaccgctgtttgactggatgctgcgcggtctgctgccacgacttggcacgccagagacactgctctcttttcttcacgtcaccgattttgcgcaagcagtgggtcagtggttaagcgccgaaactgtacagacgcaaacctatgaattatgcgatggcgtcgccggaggctatgactggcaacgtgtccaacagcttgttgccgatgtccgctgtggttccgtgcggatggtcggtattcctctgccgctactcacctgccttgcggatatcagtaccgcattgagccgtctggcgggtaaagaaccgatgctgactcgttcgaaaatccgtgaattaactcatgccgactggtcggcaagtaataaccgtatttctgaagatattaattggtttcccgggattagcctggaacacgcattacgcaacgggctattttgattgtcttgtttaaaggtgtgttaacgtttctatggtaaatcgtgaaatagtaatggattacatcctttcctgtttacaggatttggtcgaaaacggtgtggaaattaagcccgacagcgatctcgtcaacgatcttggcctggagtcgatcaaagtgatggatctcttaatgatgctggaagacagattcgatatttccattcctattaatattctgctggatgtcaaaacccctgcgcaattaatggaaactctacttccatggctggagattaaataatggggctatacgataaatatgcgcgccttgctggcgagcgcctgcaatttagtgacaacgggttaacaccatttggcacctgtattgatgaagtgtattccgccaccgaaggccggatcggaaataaaaaagtgattctggccgggaccaataattatctcggtttaacctttaatcatgatgctatccgcgaaggtcaggcagcgttagcggcccaaggcactggcaccaccggttctcgtatggcaaacggcagttatgcaccgcatctgacgttagagaaagagattgccgagtttttcaatcgccctaccgctatcgttttttcaaccggttataccgctaatttaggtgtcatcagcgcacttgccgaccataacgccgtggtgttactggatgccgacagccacgccagtatttatgacgcctgttctctcggcggcgcggagattattcgtttccgccataatgacgtcaacgatctggaacggcgcatggtccgcctcggtgaacgggcgaaagaggcgattattatcgttgaaggcatctacagtatgctcggtgacgttgcgccgctggcagaaattgttgatatcaaacgtcgtctcggcggatatttaattgtcgatgaagcacattcgtttggcgtgttaggcgcaacggggcgcggactggttgaagccgttggcgttgaagacgacgtggatattatcgtcggcaccttcagtaaaagtctggcctcgattggcggttttgctgtcggttcggaagcgatggaagtgctgcgctacggcagccgcccgtatatttttaccgcctctccttctccgtcctgcattgcgaccgtgcgctcgtcgttaagaaccattgcctcacaaccagagctgcggcaaaagctgatggataacgccaaccatctgtatgatggtctgcaaaaactgggttacaagttaagttcacatattagcccggtagtgccagtaataatcggttcgaaagaggaaggtttacgcatctggcgcgagcttatttcgctgggcgtttatgtgaatcttatcctgccacctgccgcgcctgctggcatcacgctgctgcgctgtagcgtaaacgctgcccacagtcgtgagcaaatcgatgccatcattcaggcatttgctactcagaagcagtaatgtgaacccgccgtggtgttgcgccacggcgggtttaatgttgtctgtcatgccaatacaccaggctcaacgccaccagcacaaacgctaccggtaaaccgagcgcggtaacaggtgcgctcaacgcaaatagcaatcccagattgaccatgatttgatagctgatccaggtgagtaaaccaacgatgacgcctacagcgagacggctacccatccctggcgagcgcggggcactaaaggtaaacggcacagccagcaaaatcatcgccagagtcaagatgggttgccccagtttttcccacagtgcaaggcggtattcgctgctgggttgcccggtttcctgcaaataatggatgtaatgattaagctgacggacagaaaaagtattccccggcatcgataactcttcaagattcatactggtgaaggtcgattgccaggcaagataatcagatgtttcctgcgtttctttgccattcagccattttttatgattcacaccatgcaggatccacgttttgtcatcttcaatggtggcactgcgcgcataaatgtaggattcgagcgagagatcatcgcggtaatgaaaaatctccacgcccaccggctggccctgctcgttcagcgatttcaccgtcacaaattcattaccgcgcctggcccaaagcatattgccggtaatgtcatcgtcctcccccaacgcggtggcggtcgatttgatttgcagcgcctgttgctgcaatggcgacgccccccactcatctatcgcgcctaacgaaacagtccacagtatcccggcaaccagcgccaccagtgcaatacggaagatagaaaaccccgtgctgcgaatggcggtaagctcactgtttttcgatagctgcccgagaccgacaatacctcccaataaggcgataaacggcgaaagttcgaccagtgtgcgcggtaaggtcatcagcaccaccagcactgcctgagtccagcgataaccgcccggactgacatcatccagttcgttaatcaggttgaaggtggtaaaaagcggcagcaatagccctgcggcggcggcaaaaccgagaaagaggtgacggattaaatagcgactgaaaacattcatcggggaaatttctgcagcaaggagaagtcgcttgcgaccagcatcaacaggcccattagcatgagtccgggcactaaccacaaaccaggaatgaggggaatcgcgccgttagccaccagcgtacggcagacgtcgccgccataaaaaatggcaacaaacagcaacgtcagtggcagtagcgttgaaaatcgcccctgccgcggttttacccgacttaatgaaatggccagcagcgccatcaacaatgctgtcaggccacggctttgtcgccattgcagttcggcatgatcggctggaaagacggagcgtgccagctccgtgaccgattttgctttgcgtttgacgttagggctttgatccagcggattgagatgcaattgcagattacggtagatctgttcgttgtcgtcacgcccctgatgatcgagaagataggcggtaccgttatgcaacataacggtcggtttctcgggtgatgggtcaaccacatcaaccgaacgggcgcggaaaatgcgggttcgattggcagtagaagtataaatcagcgcgtcagtcaggcgattattatcctgatcaaccgtctgcgaaaggatcattcgtccgttatcgttagtgttaaatttctttgcccgcaactgacgaacatccagctccgactgcgattgttgctccagttgataaatctgcgcataagcccagggacgaccatacatcgacagaagggtgacaaaaatacttaacggtatcgccagataaagaacggctttgtacaaacgtcccggactgccccccgccgcggagatagcggtaatttccgagtcggtatacatttgccctagcgtcacgccaactgaagcatatagtccaacaggtaacagcatctccagtgcaatcagcactttgtagaaaacgatatccagcacaacatcaagagctaatgtcccatttgccgcttcggtcagataacgctgtgcggagtagctggcgaaaataaagatcagaaaaccgacgataatcagcaccagacggcgcgtaccacgcatgatgtagtgttcaaccagcttcatctcgctaacgccctcaatcctttgaattttttattcattgatcagtttctgcgccagcgcaatgacatgatctacctcttccggtgtcaggctgccgtcctttgcccactgaattcgcccggctttattcaataccagaatggttgaactctgctccggcaattgccaggcaacgcgtcccagaccattgccgtcaataacgaattgcgcccacggatagcggcgtttatttttttcgattttgccaacgacaaaatagccagtaccaaagatggcatcatcggtgttcacaatagtggtgggctgaaaacgatcctgcgaaaagtttgccgcttcaaccgctttaattaacagtgagttctttttcttcgcagacttacgtccggcgatatactgaataatgcggacttttcccgtcaattgtgtgctgttccacttttggtagtgaatttcgtcgtcgctattcagaagcagctcgccgccttcctggatataaacaggagtaaccgttttgccagtgacgaaattgtgtgccgccgcgcctggcgctaagagtgcgatgatcagagcgacaatccaacgagatggcattattgctccggatatagtgggaaacgcgaaataagcagttctaaacgctggcgaatatcgctatccagcgccaccggtgcatcatatgaccgacggttatccatatcatccgccaccatgtcgtcgtgcttatcccccatcagaccattaatggcggcgagaaaacgggaaatcagtaacgcctctttattttcaggatcaagcgatcttaaggtgtcgtaataagaaacctgctggctgatgatttttcgcacatcatgaaattccctgccagttagttgcggtttagcaataatctctttcaggatgtacatttgcttctggcggtaggcgataaaaccgttcacggtttctaactggctatggcgcaatgaatagttcaccagccaccagacaggggagctcaaataaacacgtaacaggttaccgtaaaacgacacaatatttttcttaccgttacgaaagccatcctgaaaatgcccaagaaaaacggtcgttttgccgaataaaaatccggcctgatgcttctttaaatacagccgttgcgcaaaacgcagatgcttgtagcgcgctcgcatgtatttaaactgtttgcgctcgtctgtcgtcagctcatcgcctttcgcctgtttgcggattaaacgcagtaactcctgacgattaacaccatccagccagaatttcaggcataacgcgtaattatcatggatgatttcggtggtacaacttagtgcgatagtcggcggcaaactgacctgtgcatcaacaacatcatcttcttcaatcgcaacaaatagacgctcgctcgcctcaagcgggaaatattttctcatcatcaggatttctctccggttgagttataaagcaaggaatggcgctgaaaaaatgcctttaaggtcggaattagcgagagcaccacatccagacattgcccaccgaagtaagcaaatgcagcccccagcacgccaaacagatgacagaacatgaacagcaatacgatgtagccgattgaggcgatggtttgcgccacgagaaaagcgcgctgttttcccgccatcaatagcaatgactcctgtgggaagcccagcatcgaaatcacaattgcgcccagcatcacctgaatcaggtcatacgcttcgagatacttaacgccaaacaccagcgaaatgagcggcttgccgacgatcaacaccgcgagcgccaccagaataccgattccgcccgccagtaaaccggacttcacgcctaacaaccacggtctgatggtgcgtggatctaaacgcatcacctctggataaaaacttttgcccagtaaacccgctggcgttccggcggcatcgaagaatgtcatggcgattttaaataacccggcagcagcgggtcctaacacgatccccaccaacactgtgctgcacgagttacgcgccgaccagatggagtgggcaatgttggttgaccagacaaaactccacgcgcctttaatgtgtcgggcagactcaaacagattcaatttgaaggcgttatggatatttctgcggcgtaattcgcgcgcggcaaaccaccagtacatggtgccgccaaccagattcgacacgtaccaggcaataacaaaacccgcaaaaccaaagtcaaaataccaggttacgacgctccccgctgcgcgcagaaaaggtttcgtcgcttgctgtacagcaattagatcgaagcgatctaccgcacgcagaatgccggtcggcgtggaggaagccattgaaggaatgagcgtgcaatacagcgctgccagccaaaagctttggtcatccagacctaatgaatgggaaagaaaagggagtaaggcaatgccgccgacaatcgccaccgcgccgctgacgatatccagcgagaaggaaaatgagacgacattgcggaattgctgcggattattgttggttaatgctggtgttccgtactgaaccaccagctgccatgtctgaaacttaataaaatcgctgatcgatttggcgtacgattgcacaattaccagtacgccaaacatggcgggcgtcatccctttaccggcacacgagagcgccaacagccccagcaaagcgctcacaacattactggagcctaaccaggcgctattgcgaataatggtgcgaaacgcgccatctgcaaaccaatgtttgatgttaaaacccgccaattcagcctgaccttatcgttgatagtaaaaagtatcccgccagccttaagttaaacttcggcggtcagaaacgatggcaaccagagaaaccgccttctgtgcctgttccagcacctcgctgtaaggcgctctggaatcaatctcaagaatttttgtgccgttatagccaatcgtcgacataacaccgattttgtcctgcagctcggcatagtcatggtcaggcttgcgggagatggcagtatcaatatcaatccccaagcgaatgattaattcaggacggtattgcgccattttttggtataaacgccgttcacgctgcgccagaaacctgctgattttcccggtcgcacgttcgacgccaatccccggtccgtcataataaaagcccgaaatttcagcctgcgggaagcgatcgctgaccaccagaacgccactttgcgccagtcgctgaaccttgcgcagattcgccattcttcgcagcgagaagcagtacataatcaccgccgcccatagcgccggagatttggttttcatgctttgggttttcgaggatttggccgccagtcgccgttcgagccagacaccaaccaacggcaatcgtttgattttgtcgccgtcttcgccggagagcagccccagatagcgccgctcggtttgccagtgttgttgcagcgatttcaccaggtcatttgtcagtgtggatttaccggtgccatcacacccgaccaccgcaatcagccccggaatgtagttgggctgcggcgcggttgtactcttaacagtttgtgtttgtagtgcatccattcgtttaatcatcccctatccattttggtgatcaggaaagcgcggcgtgaattgcgcgtagtgacgcttgcagaatttcatcggctggttgccgaccatccagttcaaggatcctggcgccattgaatgtcagttgcggcgtaacggcgattttttcctgtaacgctgccagttggtggtcaggtttacgcgcaaacgcggtttgttcatcaatgccaagacgaatcaacaatacaggcaaataagaagccatccattggtacagcttcagctcacgctgccttaacatttttatccaaccgttaccgcccgtggtttttgccaattgcgggccatcaaagcggaaacccggcacttcaacctgcgggtagcggtcggtgatgagcagatagccttgctggtttttacacaacattttgcgaaacttgtacgcccgccagcaggaaagcagatagataaccagcgcagtaatattgccaggcggtgttgagggcttttcgtgcacatgtgccgctttacttcgcaaataacgcccaaaaggtgcgccaataacaggtagctgtgaaatccattcgccaattcgcccggacgattgcccgagataaatgtgttctgttggcattcttgatgccagttcatttaccaggcttgccgtgagggtcgatttacctgaaccatcacatcctacaatggcaataacacgcactggcgtggaattaattattgacatattacgttgattcacgaaaaacccggcagcaaataatgtattgaatattacgtggtccgtgctcagaatatccgttcaaccttattgtgacaatggttaattgtgacattgacctgaattacgctttcatcaaaaacatattaaccaaataaatattttggatggatatttaaatttaaggatatattcatgcagtcaataatacctccattaattgccgttattggtagcgatggttcaggcaagtcaacggtgtgtgaacatcttattaccgttgtcgaaaaatatggtgctgccgaaagggttcatttaggaaaacaggccggaaatgttggtcgtgcagtgacaaaattaccgttgatgggaaaatccttacataaaacaattgaacgaaatcaggtaaaaacagcaaaaaaattgcctggaccagttccggcgctggtaattacagcgtttgtcgcccgccgcttactgcgctttcgtcatatgcttgcctgtcgtcgtcgcgggttaattgttttaaccgaccgttatccgcaggaccagattcctggcgcttatgatggtacggtgtttccgcctaacgttgaaggtggtcgttttgtctcatggctggcaagtcaggaacgtaaagcatttcactggatggcgagccacaagcccgatctggtcatcaaactcaatgttgaccttgaagttgcctgcgcgcgtaaacccgaccataaacgggaatcgctggcgaggaagattgccataacgccacagttaacctttggtggtgcacaactggttgatatcgacgccaatcagccactggaaaaggtgctggttgatgcagaaaaagcgattacggattttatgaccgcgcgtggttatcactagtgaaaaatggaaatgcccgatcgccaggaccgggcattttcaggaaggttaaatcaactgcaatgctatccagtacaacccaccagaaagaaaaatcgccgccggtaaagtaaacacccacgccatcaggatgctggttaccgttttacgctgtaacccaccgccgtccaccaccatcgttcctgctactgcagacgagagtacgtgtgttgtggagacgggcatcccaatataactggcaaggccgatagacactgccgccgtcatttgtgccgccatgccttgcgcatacgtcatgccgcgcttaccaatcttctcaccgatggtcatcgctacacgacgccagccaatcatggtgccgatgccgagcgccagtgctaccgccatgatgatccataccggtgcgtactcaatggtgcttaacatatcgctgcgcagttttttcagcaggttctggtcttctttactgacgcctggcagtttcgccagcttcgcggaggtatcagagatgcacagcataatgcggcgcagctggctgcgctgactcacgcttaacggctcgtaactttccatattgcctggcagcatcgttttaacgcgcgcaatcgcatcaaaggtatttgccggatgacagtgaaactctgttacttgcgtgccatcagtcgatgtcgcaggcaatggaggttccatcgtaatcaacttctgcggcagttcaggatgctgttgcaggtagtgttcgaagttggtgacggcatcgcgggtacgggtaatttcatagccggacgcattcatattgacgacaaacccggcgggagcaatccccaccagcaccagcatcaccagaccaattcctttctgcccgtcgttcgcgccgtgcgaaaacgccacgcccgcagcggaaacaatgagggcaatacgcgtccagaatggcggcttacgtttgccttttttctttttgcgatcttccggaatgcggtgaatacggtcacgctttttcgtcccactccagaaacggcgtagcagaaaaattagcccccccgcaatcaccagccccacgatgggagagacaatgagtgaagagaaaatcttggtgacttcgcgcaggtttaacgcatccatcaccgacgaaccatttaacagcgcgttggttaaaccaatgccgataatcgcaccaatcaaagtgtgcgaactggaggccggtaaaccaaagaaccacgttcccagattccagataatcgccgccagcagcatggaaaagaccatcgccagaccgtgagttgaccccatattcagcaacaaatcggttggcaacatatggacgatggcataggcaacgctaagcccgccaagcaatacgccaaaaaagttaaaaaatgccgccatgaccacagcaagctgtggttgcatggcacgggtataaataacggttgccaccgcattcgccgtgtcatgaaaaccattgattgcttcatagaacaacacaaatgccagagcaagtaataacaaaagccccgtatatatatcaaggccaacaaataaatttagcatatattagattacgccattttgaatttacgaacggaggcattatcagtgactttcacggcgtgggcaaagtgaaatatcattttttaacgataaaaagcgtgttatttcttgtgtatcagacaataagccttcattcaaaacctttaaaaataatcaaaacacaggtattccacttgttaatatattcatatatgaaatgaataaatattgaaatatataaatattgaatattttgattaatccccgtactgattattcttcataatcagtacggggttgctacaacatgtattactctttcaccacaattaacggttcaatatcactctcttttttgatgaccagtgattcatcaccgcgcaaacacgtcccaccgtagttgccgccaacggtgaaagtacatacctgaatgtatttaccgtccactttcggcaaacaccacagttgctgatagatgtttttctgctcggcaaatttaccgctggttttgtccagcacctcttcatgatggctgacgaggtcgatgttactgccacagcgaccggcgatcggtttaacggcataaccggttttcaccagctcatcattcacggtgaagtcagtatccaacagataacgatggtgcgggaacagagaccagaggatcggcagaatcgctttgttaccggggatcaccgtccatagcggctcaaaaaccaacacttccgggcgtaacagaacgtctatcagacgaacttcattttgtggatgcccggtacggatcggcactgcggcaaattcacggtcgctcacttcgcggatttgatcaaatgccgtttcccacgcccaggttttccatacgcagttaaccagtcgcccttccccatcaatcagttgcccggcagcatcccagcccagttcatccaacccacgcaagatacgcgtttcaaagcccgcctggtgcagcgcctgctccataaactgcgcgtgatagttttcctcgatatctttgtcctgcatgatatggacaaacggacgtgcacgactgtgtttccacgcgccagccagttcgttaatcagtccttccgcaggattgaagccgttgcctttatagccctgctccgcccaacgttcgaggatcaagcccgcttcggtatgacaggaggcagaatcggcgttgtattcgtagactttcaggccacgttcatccatgcagaaatccatacgaccagtgatcatatgatgacggcgacgctgccaggagagacgcaaacgtggccagaggattttcggaatgtcaaacagcgccagcaggttgtcatctttcagcaccttgtcggtggcgtgaagatacatcaggtgcagctcgttggtggctttaatcagctcctgctcggcactctcggtaatggtgtagtaatgatacggatcctgattgatcacctggccgttggcctgtacataggcgttttgcagcggatctttttcatccagccatttaccgtcaaactggcctttgttttccagacgcgccccgctgattttcagcagttcgcctgcaatttccggctgtggcaagctgtattcggtatcttccgtctggatcatccagcccagaatagtggtgtcatcgaaggtgtctttcagggtatagccgccgttttcgaccaccatctccagctcgcgtgtccactgttgcccttgcggcaacggggtatgaatcacgttctgttccgcaatacggactttgttgccatgcaattgggtaatgatggcgacatggccagtgtctttaaattcaccgcctttatcccagataagaagcgcccccgctaccggtgcacgcggcgaaccgttaggaaatgcctgcaatggcaggatgttgtcattgaccacttcacgcaggaagcgcagtgagaaaatctcccatgccatacccacgtcagtgaagactacaccgtagttcagaaagagaaaacggcgagcaaattcaacgcattgccatttgtggcccatatattcatcgtcgatatagctacggaatacggcgtcatcttcgtattcctgcggatcgagagaactgtaatctgaagagtagattgctaccccacctggggcgtagcccaataatgtcccgaacggggcatcctggctggtcgttcctttgctcatcactttacctttaacaatacaacctaagcagttggcgtaattgttgtgctctgattacctgctcagcgacattaaccggacagaggtcagactaatcatacacctcatcgcagcggctggcgcaaagggttaaaaaattcacattctgtacagcaagtgacctgctacactgcttcaacactaccactcagaaggcaactcactatgacagacaatacttatcagcccgcgaaagtctggacgtgggataaatccgctggcggcgcgttcgccagtatcaatcgcccggtttctggtccgacgcatgaaaaaacgctgccggtgggcaaacatccattgcaactttattcgctgggaacgccgaacggtcagaaagtaacgattatgcttgaggagctgctggcactgggcgttactggtgcagagtacgacgcctggctgattcgcattggcgatggcgatcaattctccagcggctttgtcgaagtgaacccgaattcgaagatcccggcattgcgcgatcatacccataatccgccgatccgcgtgtttgagtcaggctcgattctgctttatctggcggagaaatttggctacttcttgccgcaggatctggcaaagcgtactgaaacgatgagctggctgttctggttacagggcgcggcaccgttcctcggcggtggttttggtcacttttaccattacgcgccggtgaaaattgagtacgccatcaaccgctttactatggaagccaagcgccttctcgacgtgctggataagcaactggcgcagcataagtttgttgcgggcgatgagtacaccattgcggatatggcgatttggccatggtttggcaatgtggtgttaggcggcgtatatgacgccgcagagtttcttgatgcgggcagttataagcatgtacaacgctgggcgaaagaagtgggcgaacgtccggcagtgaagcgtgggcgtattgttaaccgcatcaacggaccgctgaacgagcagttgcatgagcgccatgacgccagtgatttcgagacaaatacggaagataagcgtcaggggtaatggttagcgttcgtcgcagcaagccatccagaccaatgtaggccggataaggcgttcacgccgcatccggcaatcaggcacaatgcctgatgcgacgctgccgcgtcttatcaggcctacgaaagcatccggctttaatcatcacgcgctggtaatgtcgtaatccatttggcgcagtgcgtctaatgtggctttggcttcgtcttcatcgataatgctcatggcaaatccgacgtgtaccagtacccactggcccagcagatcggcagggttaccttcacaaatcagggcgatattcacgtcgcgcttgataccacatacttcaacctgcgcaagctggtgaatatcttcaccgacagccagcacctggcctggaacgccaatacacattgttaactccggttattcaacttcaatacttttgacgattagcgaatcgccggtatcgacacgcaaccgctcgccatgacagatcggacactgcgcatcgtgctgatgaatctccaccacctggctgcaatcccaacaccaggcctgggcgggtttatagacgatatgtaaatcgcacccttgcgctaccgttccgtggcagacaatttcaaaactaaaacggacggcgctctcctcaacgcaggagagtgcaccaatttccagccacacggcggtgacgcgcttaacatcgtgctgctccgcctgccgttggataatttcaacggcgctctggcaaagcgacaactcatgcattttcgccactcctgcggccaaatagcagggcacgacgccctgcgtgtggtacatccggattggtgactggcagcgaaaggatcattcgggcgcagtcatccgtcagccgttggccctcttcaatcgacatgctgtgcgaaagcggcgacatcagcgagcaggagaggtattgcgaaacaccgtccagttcaccaacagtaaaggtcatagtgccatacggcagttgcagaccaattttttcactcactttgcgcagcggccagagttgatccgggccggggaagataactgcactcagcatccacggggtgatcacacaccccgtccactgaccttcgaacagcgtaaagtcagaaacatacaccggcattgaaggatgcagaaaagagagatcatgcatcgaacgccgggcaatttcttcaaaagctacctgtacttgcgccttcggggaggtctggaaacctgctatctcttcagtcatgagtcgcctcccgtgggatagcttccacgcctgattcgcgcagcgcagccagaacctgctcaagcgcaggttcaatcatcgattcgaccgtcggcgtcaaaccgatgtgcggctccagtgattccgggatcacgccgaccagggtcagctttttcggaaactcgccagtgaagcgcagggccgacaatacgtcggccaggccaagctgatgcggagagattttgttggtaaacaacgccggaacttcttcatcccgcaggatcatcatcgttcccggcgcgttctttttcgagacaatggcatccgcaataatcagatgatcgcgatttgccatgtcaccaagcagctccattcccgccgtgccgccatcgaggatctcaacataatccggcagaatgtatcgttgctctaacgcttcaacaatccgcacaccgatggcttcatcggtcagcaaaatattgccgacccctaagactaaaatacgcattacagaaccttcactgaaaccacttcgttgccgtcggcatccactacgtgtaccgcacaggccatgcacgggtcgaaggagtgaatggtacgcaccacttccagcggtttattcggatcggcaaccggtgtacccaccagcgactgctcgtaaggaccgacgtcatcattgaagttacgcgggccagagttccaggttgatggaacaactgcctggtagttgctgatgataccgtctttgatcaccatccagtgagagagcataccgcgcggtgcttcgaggaagcctacgcctttgaactcacccgttgccggaatgttcggcttcacaaaggtggtgtgatcgcctttgccgatattggtgatcagtgcactgtattgattttgcaggatatcctgcaattcacagcagtgaacggtacgaccaataatacggcccagcgtggagtgcagctgcgccacttccagcgtgttgccagtcagtttctgataaatcgcaacgatttcattcagtttgttctgggtagactcgcgtcctgccgccagtttcaccagcatgttagccagcggacccacttctaccgttttgccgtagaaagtcggtgatttcacccaggaatatttaccgtcgtcagaccaaccatcataagccggaatggtggtaccttcccacggtgcctgcggcgcttcgtctttataccaggagtgcttcgcgctttcctgaattcctttgatcaggtattcatcggaatgagaagtgatcggacgatacgaggacagatccgcattctcaatgtagccgcccgggaacaggaagctgccatttttactgtcggtcgggaattccggcacgctcaggtagttcaccgcacctttaccgcgcgtcagccattccgggtagaacgcagcgataactgcagtatcaaccttgtaaacctgctcaacaaagtcgctcagcttgtcgatgaaggacttgatgtacatcaggcgctcaaggttcagcacacccagaccgtcgaggttgatcgggttcgcgacaccacctaccgccaggttctgaatatgcggcgttttaccgcccagcagcgccacaacgcggttagcgtcacgctggcactccagcgcctgcaggtagtgcgctaccgcaatcaggttcacttccggcggcagtttcattgccgggtgaccccagtagccattggcgaaaatacccaactgaccgctggcaaccagatctttgatcttgttctgaactttggtgaactcttccgggctgttcagatgccaggtcgaaacgcctttcagcatttcggaggctttggctggatcagcttgcagtgcagaagtgatgtccacccagtccagcgccgaaagctgatagaaatgaacaatatggtcatgcgtggtgtgcgcagccagaatgatgttacggatgtattgcgcgttaaccggaacgtcgatattcagcgcactttctgccgcacgaacggaagacagcgcgtgagtggtagtacatacgccacagatacgttgcacaatcatccatgcatcgcgcggatcgcggtttttcacgatctcttccatgccgcgccacatggtaccggaagcccatgctttcgaaacgacgccattttcgatttcgcaatcgatgcgtaaatgcccttcaatacgggttaccggatcaatagtaattctctggctcatgctttgctcgcctcatgacgattatgatcgttttgttttaaaggaggaagtatcggcagtagacgaatgagtacgatataagcgcaaatctcaatagccacaaaaccaatagaaatcaacagttcttcccaggtcgggaagtaggcgtaaccgccacccgggttgaatgccaccagcgaataggtcagacgccaggttgcacaacctaacagtgcactcagtgctgacaggaacagcatgcgggaatcattacgcaacttcgccacacgcagaaccaccagcgggaagagcatcagcaggacttcaatccagaacatcacggagtagaagtcaccggcaaacgctaacgacagcttgtcgcgatagataagctcgccaaagcgcagcacgatgaaaatcgccagcaacacactgatggtattggtcagcttaacgaacagactcttttcatccggaccgttgccacgcagacccgcctgcaccaacgaaccttcaaagatgacaatcgagaagcccatgatgaacgccgtcagcagcgagaacagcggcaacatttcatagctttgccacagcggatgcaccttgtagcccgccgagatcatcagcgatcccattgaagactggtgcatagttggcagcagcgcaccaagcgcgatgataaagaacatcaccttgttcagacgtttgagtgacagcttccagcccagacgttcaaacaatgccggagcaaactccagtgccatcacaccgatgtagatggtcatacagaccgccgtctcgaacagtaccgagttcacgttgaagtgacccggaatgtagaagtacggcaggttccagtagcgacccacgtcgatagtgatcgacaagccacccagtgaataaccaaacagactcgccaacagcgccggacgcaccagcggatggtattgcccacggttaaagacgtatactgcccacgccagcgcccagccgccacaggcaaagccggtaccgatcagcaggtcaaacgcgatccacacgccccacgggaagccgccgttcaggtcggagacagagcccagaccgaacaccagacgcttcacaatcaggagcatacagatgacgattaacggtccaaaaatcatgaccggtttactgatgattttgccgcccagcggttgtggatcatgactcatgatcgtctcctccgtcgtgatggtcgtttttagtgttgcgacgaaccagcacggttaagcccgccagcacagccagtggtagcatcatgcctttatacagggtgtgttggacatgttcggaacgcgcaccagtagaaagatcgtccagtttcggcaggtcgagattttcataaggcacacccgtcagtaccagaacctgagtaccgccgccctctttctcgccgtacagatgcggataatatttcggcaccgtatgcaggtaagtgtcgccagatttcagcgtctgacgcggatagtggtattcgctgcccggcttcagcgccagacgttttttcgcctccgccatcagctcttcacgcgtaccaaaaatcaccgcgcccgccgggcacacttctacacagccaggcagaccgcctttatcgagacgttccacacctttctggttgcacaactcgcacttatgcagcgcaccaaacgggttgttgtagtcgtacttcggcacgttgtatgggcaggcgaccatgcagtaacggcagccggtgcacacatctttgtcgtaatggacaatgccggttttcggatcttttttcagtgcagagaccgggcacacagagacacagttcggatcgacgcagtgcatacactgtttcttaatgtacgcgtagccattctcctcctggtctttgttgacccctgtgccgctggtccacacctgaatgatgttattggtatacggcgacagtttgtcgttgttcgaccaggtctgttccccttgcgggttacgttcagggaagttgatatcctgacacttggtgacgcaagcctggcagcctacgcacaaggtcgagtcgtacaacatccccagcgatcccggaattggcgggcggttttcagcagccgcatgactgacagacggcagcgcgcccgtcagcaatgccccgcaggaggctgctttaataaaattacgtctgttcacggttattctccccgtgagtcagcgttatctttcttttgctgacgacccagttcacgcaccgccatcacgctgacaccggcaaccagcccaaccacaccgccgagcaaaccaatagcgcctgccgagacgttgccgccttctttagcgttaacgtccggtttctgtgaacgcggagtctggttttcgacgttggcaagctgatggatgcctttatggaagccgataccttcttcgttacagccatagcacgggtgaccaatcgctaccggccacacgccgccaacatcgcagaattgcagcgttgagcagttgccgtaagtttctggccctttacagccgaggtggtacaggcaccagccttcgcggtgaccttcatcaccgaactctttggcaaaacgaccagcatcgaagtgcgggcgacgttcacagtgttcgtgaatcagacgaccataggcgaaagtcggacggtttttgtcatccagtttcggcggtttgccgtaagtgatgatgtgcgcaacggtcgcgaggaagttgtgcgggttcggcgggcagccaggaatattgataacggttttgcccggtagaacttcttgcaggctgactgcgccagttgggttaactccagctgcggcaacaccgccccacgcagagcaggaaccgatagcgataatggctgctgcgccttccgccgctttgcggatgtgatccacaatcggctcaccggcaaccatgcaataaataccgttatcttttaatgggatggaaccatccaccactaacacatactgccctttgtacttctcgagagcgttatgtttgttctcttcgacctgatgaccgaaggcggcggaaagcacttcgtgatactccagagagatagtctccagcacgaggttttctaccgttggatgcgttgcacgaagcagagattccgtacaaccggtgcactcctgcgcgccaatccagataactggcggacgctgcgggttagtaaccgattcggccatctctgcagcggctttgctacttaaccccatggtggcggctaatgctgcacaaagcttcatgaaatcacgacggttaatgccgtgagaatggatgagggtgttatctccagtcatttatagttattccgttgcgaagacctggcatatattttgcctcaatcgcaaaatcaataatgcgatcgatgcgccatttaccacacatttattatggttatcgatatcatgatactgcggcggggcactaaaacgaagggaagaagcattagtgtaattaattaaagcaagataatacgtatgtttgatcaattttctaggcgataaccggccataaaaaagcgcaacgtagaacaggaattattctcacgaaagaaatccattaccatctctttatccagtccataacggcgcgtcagaatacccgcttcccaggcgctaagctggcgatctccggtcttttcgtacatccggtgtgagtagcctaatacaaaaccgcgtttataatcggcacagaattttgtcacattaaccgcactgtcggcatgcgttgcttttaatcccgccattaagcctttaccaaaatggttattcatcgttcacctcattcgctatatattgtcatatatagcgatattttaggcaaagaacgacatttgcgcacgctattttttcatgcttgtttaagacgtaatcctgtaagagataaacccatcaggagagatatttatcgaaccatttcagcgtcctttgccaggcaagatcggcggcagatttgtcataacggggcgtggaatcattatggaatccgtgattaacccccggatatatatacgcctcatagaccttattattggctttcaacgccgcctcgtaagcgggccagccctcgttgattcggctatccagttcagcgtagtggagcagtaaaggcgcttcaatcttcgccacatcggcagtgggtgcctgacgcccataaaacggcaccgcgcaggccagttccggatacgcgactgctgccgcgttcgatacgcccccgccatagcaaaatccgctaatatacactttgcctgtcgcttgcggatagcgttgcataaactcaattgcggcaaagaaatcattcatcagtttggttggatcaacctgctgttgcagttcgcggcctttatcatcgttaccaggatagccacctactgagcttaaaccgtctggcgccagggcgatgtacccttccttcgccactcgccgcgtcacatcttcgatatacggattcagccctcgattctcatgcaccactaccacggctggcgttttaccgctcatttttgcgggcttcaccagataaccccgtacctcgccgtgaccatttggcgagggatacgtgatgtactctgcaacaatttccgggtcggtaaactctacctgagtcgccagcgcataatttggcttgagcaaatcaaacagcgctaatgccgtcatcccgcccaccgcatacttcgccgcaaggttgaggaactcacgtttcgagattttcccgtgagcgtaatagtcgtagtaatccagcaactcttgtgggaaagctttggcagttaaacgcggcatcgttgcactcctcaactggtgtttttttaagcaaagcataagcgcgtgtttttgcccagtttttcgtcactctgtgagccagactacgggatacgcgcaggcgaatcgctaaactagaaacattgtttcgaaattgaacggtggaaaggagaggtcatggtctggttagcgaatcccgaacgttacgggcagatgcagtaccgctattgcggaaaaagtggtttacgcctacccgcgttatcgctcggtttatggcacaatttcggtcacgttaacgcgctggaatcacagcgtgcgatcctgcgtaaagcgtttgatttaggcattacgcactttgatttagccaacaattacgggccgcctccaggaagcgcagaagagaactttggtcgcctgctgcgcgaggattttgccgcttatcgcgatgaactgattatctctaccaaagccggatacgatatgtggcccggcccatatggctctggcggctcacgtaaatacctgctcgccagcctcgaccaaagcctgaagcgtatggggcttgagtatgtcgatatcttttactctcatcgcgtcgatgaaaatacgccgatggaagaaaccgcctctgcgctggctcatgcggtacaaagcggtaaggcgctgtatgtcgggatctcctcttactcgccagagcggacgcaaaaaatggtcgagttgctgcgcgagtggaaaattccgctgttaattcatcaaccttcgtacaatttactgaaccgctgggtggataaaagcggcctgctggataccctgcaaaataacggcgtgggctgcattgcctttactccactggctcagggattgctgaccggaaaatatctcaacggtattccgcaagattcacggatgcatcgtgaagggaataaagttcgtggtctgacgccgaaaatgctcaccgaagccaacctcaacagcctgcgcttattgcatgaaatggcacagcagcgtggacaatcaatggcgcaaatggcgttaagctggttgctgaaagatgagcgagtgacgtcggtattgattggtgccagccgcgcggagcaacttgaggagaacgtgcaggcgctgaataatctgacatttagcaccgaggagctggcgcagattgatcagcatatcgccgatggagagctgaatctgtggcaggcgtcttccgataaatgacctgttaataacgggcgcgagaaccgcgcccgaatcagatcagtgattatgacgagtcagtcggtcaagatagcccatcacaaatgcagagagcacaaacgtcagatggataatgacgtaccacatcagtttgttatcagggacatttttcgcatccataaagacgcgcagtaagtgaatggaagaaattgccacaatcgacgctgctactttgtttttcagcgacgttgcgtccattttccccagccagttcagcttctctttgttctcagagatatcgagttgtgagacgaaattctcgtaaccggaaaacatcaccatcaccagcaaaccgccaaccagcgtcatatccaccagcgacagcaacacgaggatcaaatctgattccgccatcgagaagatattcggcagtacgtgaataatctcctggaagaacttcagcgccagggcaactaacgccagcgaaaggccaaagtacacgggggcaagcagccagcgagaagcatacattgcattttcaagaaaacgttccatacattcctgtcgtgtagttaaaacgggcaacagtatatcgcaattaagtaaacagcacgcaacagcaaatcaacatatacgttaaacctttgtcgcataattctgagggttagggatcttcctggttcccttatcaacgcatcgagagcgtctacccttaaaggacgttgaacctgaagggagaaaaacgatgtctcatttaaaagacccgaccacgcagtattacactggtgaatatcccaaacagaaacaaccgacgccaggcatccaggcgaagatgacaccggtaccggattgcggcgagaaaacctatgttggtagcggtcgcctgaaagatcgtaaagcactggtgacagggggcgattccggaatcggtcgcgctgccgccattgcttacgcgcgtgaaggggctgacgtggcgatcagttatcttcccgtggaagaagaagacgctcaggatgtgaaaaagatcattgaagaatgcggacgcaaagccgttctgctgccaggcgatttaagcgatgagaaattcgcccgttcgctggttcacgaagcacacaaggcgttaggcgggctggatattatggcgctggtagccgggaaacaggttgccattcctgatattgcagacctcaccagcgaacagtttcaaaagacctttgccattaacgttttcgcgttgttctggctaacccaggaagcgatccccctgctaccgaaaggtgcaagtatcatcaccacttcctcaatccaggcataccagccaagcccgcatttactggactatgcggctacgaaggcggcaattctgaactacagccgtggcctggcaaaacaggtcgcggagaaaggtattcgggtgaatattgtcgcgccaggcccgatctggacagcactgcaaatttctggcggacaaacgcaggataagatcccgcagtttggtcagaaaacgccgatgaagcgtgcggggcaaccggcggagctggcccctgtatatgtttacctggcaagtcaggagtcgagctacgtcaccgcagaagtgcacggtgtctgcggcggcgagcatttaggttaaaaaaatgcccggttgtgaaaagcaaccgggcatcatttttatttcgctttcgcagtttcttcgccgaccagacctattttcaggtaacccgcctgatgcagcgtatccattaccttcatcaacgtctcgtaatcgacagttttatccgcacggaagaagatggtggtgtctttcttgccttcggttaacgcattcaacgccgtaatcattgtttcatcggtgaccggatcgttaccaataaacatcgagttgtctgctttcaccgacagataaaccggtttttccgggcgcggctgcggcgtgctggtagaagcaggcaaattcaccttcacatctaccgtcgctaacggtgccgccaccataaagataatcagcaaaaccaacatcacgtcgataaacggcgtcacgttgatatcatgcatttcgccgttatcgtcgaggttttcgttaagatgcatcgccatcggacattatcctgcacgtaatttttgtgcgacacgaaccggatgcgcagcggcgctggcttccagatccaggtcacggctttgcagcaacaatacctgcgctgcaacatcacccagcatcgctttaaagccgccaatctggcgtgcaaatacgttatagataacgaccgcaggaatcgctgccacgaggccgattgccgttgctaacagagcttctgcaatacccggcgcaacgactgccaggttagtggtctgcgtttgcgcgataccaataaagctgttcatgatgccccagaccgtaccaaacagaccaacgaacggcgaaatcgcgccgatggttgccagatagccgttaccacggcccatttgacgacctactgcggcgacccgacgctccagacggaagctggtacgttctttaataccttcgttatcgtcgctgccttctgacagttccagctcattctgcgcttcattgagcaaatgcaggctcaagcttttgctaccaaaatcagcggcgatatcgttggcctggtttaaggaacgcgcttcagccagcagttgctgctcgcgcttaagacgacgcttctgattgaagaactccacgctcttactgaagaagattgcccaggtgactacggaggccaaaataagcccaatcatcacgcacttaacgacaatatcggcgtgctgatacataccccagacggagaggtccgtctgcattaaattattacccactgtgtatctccaggacgcaagtcacaaaatctgtgcataataatatcaaaacgacgtcgaattgatagtcgttctcattactatttgcatactgccgtacctttgctttcttttccttgcgtttacgcagtaaaaaagtaaccagcacgccatttgcgaaaattttctgctttatgccaattcttcaggatgcgcccgcgaatattcatgctagtttagacatccagacgtataaaaacaggaatcccgacatggcggacaaaaagcttgatactcaactggtgaatgcaggacgcagcaaaaaatacacgctcggtgcggtaaatagcgtgattcagcgcgcgtcttcgctggtctttgacagtgtagaagccaaaaaacacgcgacacgtaatcgcgccaatggcgagttgttctatggacggcgtggaacgttaacccatttctccttacaacaagcgatgtgtgaactggaaggtggcgcaggctgtgtgctatttccctgcggggcggcagcggttgctaattccattcttgcttttgtcgaacagggcgatcatgtgttgatgaccaacaccgcctatgaaccgagtcaggatttctgtagcaaaatcctcagcaaactgggcgtaacgacatcgtggtttgatccgctgattggtgccgatatcgttaagcatctgcagccaaacactaaaatcgtgtttctggaatcgccaggttccatcaccatggaagtccacgatgttccggcgattgttgccgccgtacgcagtgtggtcccggatgccatcattatgatcgacaacacctgggcagccggtgtgctgtttaaggcgctggattttggcatcgatgtttctattcaggccgccaccaaatatctggttgggcattcagatgcgatgattggcactgcggtgtgcaatgcccgttgctgggagcagctgcgagagaatgcctatctgatgggccagatggtcgatgccgataccgcctatataaccagccgtggcctgcgcacattaggtgtgcgtttgcgccaacatcatgaaagcagtctgaaagtggctgaatggctggcagaacatccccaagtagcgcgagttaaccaccctgctctgcctggcagtaaaggccacgaattctggaaacgagactttacaggcagcagcgggctattttcctttgtgcttaagaaaaaactcaatgatgaagagctggcgaactatctggataacttcagtttattcagcatggcctactcgtggggcgggtatgaatcgttgatcctggcaaatcaaccagaacatatcgccgccattcgcccacaaggcaagatcgattttagcgggaccttgattcgcctgcatattggtctggaagatgtcgacgatctgattgccgatctggacgccggttttgcgcgaattgtataacattgccacttttggacaattttgcagacattttattgtgaaaagtcttaaattgttgcgtccgggatcaaggcgtcccggacgattcaggagtacaataggcagataaaggcttaaacgctgttccacaggaaagtccatggctgttattcaagatatcatcgctgcgctctggcaacacgactttgccgcgctggcggaccctcatattgttagcgttgtttactttgttatgtttgccacgctgtttttagaaaacggcttgctgcccgcctcatttttgccaggcgacagcttgttgatactggcaggcgcattgattgcccagggggttatggattttctgcctacgattgcgattctgaccgccgcagcaagtctgggctgctggctaagttatattcaggggcgctggttagggaataccaaaacggtgaaaggctggctggcacagcttcctgctaaatatcaccagcgcgccacctgcatgtttgaccgccacggtctgctggcgctgctggctggacgttttcttgcatttgtccgtacgctgctgccaaccatggcgggaatttccggtctgccaaaccgccgcttccagtttttcaactggttaagcggattgctgtgggtcagcgtggtaaccagtttcggctatgccttaagtatgattccgttcgttaaacgacatgaagatcaggtaatgacgttcctgatgatcctgccaattgccttgttaaccgctggcttgttgggcacgctgtttgtggtgattaaaaaaaaatactgtaacgcctgacgattttccccgttcccggttgctgtaccgggaacgtatttaattcccctgcatcgcccgcattcttgccgcatcttcccccggcgtcacaccgaagtaacgtttaaactcacggctaaattgcgatgcgctttcatagccgacgcgcatcgccgccgcgctggccttcatgccgtcgtggatgatcatcatccgcgccttatgcagacggtaattcttcaaatactgcaacggcgaggtgctggtgacagacttaaaattatggtggaacgccgatacgctcatgttggcttctgccgccagttgctcgacgctcaggttttcggtgtatttattctcaatccgtttcagcacgcgactaatcaggctgaagtgagtctggcggctgaccagtgccagtaacgcgccgccgcaaggtccggtcagcacgtagtacagaatttcgcggatgatctgtttgccgagaatacgcgcatccagcggtcgctccatcacgtcgagtaaccgctccgccacgcataaaatctcttctgataacgtggcagagttaatcccgctggctgccatcgacggctggaaatgctcatcttcgccaatttccatcaacagttcctgtaactgcaaaatatcgacattgagacgcaaccctgccagcggcacctctgacgtggcataggtttcgcactcaaacggcaacggcaccgtcagcagcaggtattcattggcatcataacgaaacacgcgttcattgatataaccgattttatgcccggaaaagagaattatgatgccaggctcgtacatcaccggtgtgcgtgcgaaaggcgtctcgccatacaacaaacgcacatcgggcaacagctctgacaaactattttctttatttttcagtttattaactttatccgccagcaagcggcaaatctcttcacgtttcatatcgcgtaatttcttaggaataatgcggcaatttgattgtgcgcaattttgtagcatttctccagcactctggagaaataggcaagacattggcagaaatgagcattgagaggtacggcgctggcgaccacaatgaaaaacatcaggcagaccgatctctgccctcatattgacccagcaaagggagcaagtaatgaacaactttaatctgcacaccccaacccgcattctgtttggtaaaggcgcaatcgctggtttacgcgaacaaattcctcacgatgctcgcgtattgattacctacggcggcggcagcgtgaaaaaaaccggcgttctcgatcaagttctggatgccctgaaaggcatggacgtactggaatttggcggtattgaaccaaacccggcttatgaaacgctgatgaacgccgtgaaactggttcgcgaacagaaagtgacgttcctgctggcggttggcggcggttctgtactggacggcaccaaatttatcgccgcagcggctaactatccggaaaatatcgatccgtggcacattctgcaaacgggcggtaaagagattaaaagcgccatcccgatgggctgtgtgctgacgctgccagcaaccggttcagaatccaacgcaggcgcggtgatctcccgtaaaaccacaggcgacaagcaggcgttccattctgcccatgttcagcccgtatttgccgtgctcgatccggtttatacctacaccctgccgccgcgtcaggtggctaacggcgtagtggacgcctttgtacacaccgtggaacagtatgttaccaaaccggttgatgccaaaattcaggaccgtttcgcagaaggcattttgctgacgctgatcgaagatggtccgaaagccctgaaagagccagaaaactacgatgtgcgcgccaacgtcatgtgggcggcgactcaggcgctgaacggtttgatcggcgctggcgtaccgcaggactgggcaacgcatatgctgggccacgaactgactgcgatgcacggtctggatcacgcgcaaacactggctatcgtcctgcctgcactgtggaatgaaaaacgcgataccaagcgcgctaagctgctgcaatatgctgaacgcgtctggaacatcactgaaggttcagacgatgagcgtattgacgccgcgattgccgcaacccgcaatttctttgagcaattaggcgtgctgacccacctctccgactacggtctggacggcagctccatcccggctttgctgaaaaaactggaagagcacggcatgacccaactgggcgaaaatcatgacattacgctggatgtcagccgccgtatatacgaagccgcccgctaagctttttacgcctcaaactttcgttttcgggcatttcgtccagacttaagttcacaacacctcaccggagcctgctccggtgagttcatataaaggaggaacgtatggctaatccaaccgttattaagctacaggatggcaatgtcatgccccagctgggactgggcgtctggcaagcaagtaatgaggaagtaatcaccgccattcaaaaagcgttagaagtgggttatcgctcgattgataccgccgcggcctacaagaacgaagaaggtgtcggcaaagccctgaaaaatgcctcagtcaacagagaagaactgttcatcaccactaagctgtggaacgacgaccacaagcgcccccgcgaagccctgctcgacagcctgaaaaaactccagcttgattatatcgacctctatttaatgcactggcccgttcccgctatcgaccattatgtcaaagcatggaaaggcatgatcgaattgcaaaaagagggattaatcaaaagcatcggcgtgtgcaacttccagatccatcacctgcaacgcctgattgatgaaactggcgtgacgcctgtgataaaccagatcgaacttcacccgctgatgcaacaacgccagctacatgcctggaacgcgacacacaaaatccagaccgaatcctggagcccattagcgcaaggagggaaaggcgttttcgatcagaaagtcattcgcgatctggcagataaatacggcaaaacccctgcgcagattgttatccgctggcatctggatagcggcctggtggtgatcccaaaatcggtcacaccttcacgcattgtcgaaaactttgatgtctgggatttccgtctcgacaaagacgaacttggcgaaattgcaaaactcgatcagggcaagcgtctcggtcccgatcctgaccagttcggcggctaacgtgcaaattctcccggtggcggtaatgttccgctaccggacttttcagaaatcatttattcccctcgcgtcccgcccgttgctactcttccttgttcaggaatgccaaatataaggacatcatcatgcagagccggaagctcttaaaagaacaactcatctatatccgggataaacgcaacggagaggtgaaaaacagatgaaaataatacttctgtttttagcagccctggcaagttttaccgtacacgcacagcccccctcacagaccgtagaacaaacagtccggcatatttatcagaactataaatcagatgccactgccccttattttggtgaaaccggagagcgagcgataacttctgcgcgtattcaacaggcgcttaccctgaacgacaatcttacgctgccgggcaatattggctggctggattatgatccggtttgtgattgtcaggattttggcgatctggtgttagaaagcgtagcgataacccaaactgacgccgatcatgccgatgccattgtgcgctttcgtatctttcaagacgataaagaaaagacctcgcagacactgaaaatggtggcggaaaatggtcgttgggtcattgacgatattgtcagcaatcatggcagcgtcttacaagcggttaatagcgagaatgaaaaaacactggccgctatagcttcgttgcaaaaagaacagccggaagcctttgttgccgaactctttgaacatattgctgattatagctggccgtggacgtgggtggtttccgactcttaccgccaggcggtcaatgccttctataaaaccaccttcaagacggccaacaatcccgatgaagatatgccaatagaacggcaatttatttacgacaatccgatctgttttggcgaagagtcgttattttcacgcgttgatgaaattcgagtcctggagaaaaccaccgattccgcccgcattcatgttcgctttacgctgaccaatggcaacaacgaagagcaagaactgattttacagcggcgcgaaggtaagtgggaaatcgctgattttatccgcccgaacagcggcagcctacttaagcagattgaggcaaaaaccgccgccagattaaaacaatgagctgaattaaataacaattagccggaacaataaataaaagggaacactatatgaaaacgattttcaccgtgggagctgttgttctggcaacctgcttgctcagtggctgcgtcaatgagcaaaagatcaatcagctggcgagcaatgtgcaaacattaaatgccaaaatcgcccggcttgagcaggatatgaaagcattacgcccacaaatctatgctgccaaatccgaagctaacagagccaatacgcgtcttgatgcacaggactatttcgactgcctgcgctgcttgcgtatgtacgcagaatgataaaaaaatccccggcagcattctgttaccggggatattttttaacgtccaaccgccgctttagggcgtttcttcgcaccagcattctgcaggcgagattgcgtagacgacgctttttttgccgtagcaggcgtctgacgctgggtcgccatcggcgtatgtttagtcaacgccggacgggtattgcggttctgacggcgagcttcacgcatctcttcaatggttggcgcaggcactaagcaatcgcgacggctgccaatcagatgctttttgcccatcgcttccagcgcctggcggattaacggccagtttgccggatcgtggtaacgcaacaacgctttatgcaggcgacgctgcttgtcgcccttcggtacgaagacgtcttcactcttataaccaatcttcgccagcgggtttttgccggtgtaatacatggtggtcgagttagccagcggcgacggatagaagttctgcacctggtcgaggcggaagcgatgctttttcagccatagcgccagattcaccatatcttcatcacgcgtacccgggtgcgcggagatgaaatacgggatcagatactgttctttacctgcctgtttcgagtaagtatcgaacagctctttaaagcggtcatagctgcccatgcccggcttcatcatcttcgataacggcccttcttcggtatgttccggggcaatcttcagataaccgccaacgtgatgggtcgccagctctttgatatagcgcggatcttctacggcgatgtcataacgcacaccagaggcaatcaggatctttttaatgcctttcagatcgcgcgcacggcgatagaggttgatcgtcggttcatggttagtgtccatgtgcggacaaatatccggataaacgcacgacaaacgacggcaggtttgctcagcgcgtggcgatttgcagcgcaacatatacatgttggcagtaggcccaccgagatcggaaatcacgcccgtaaaacctggaacagtgtcgcggatcgcttcgatctcattaataatcgaatcttcggaacggctctgaataatgcgcccttcgtgctcggtaatagaacagaaagagcagccgccaaagcagccacgcataatgttgaccgagaaacgaatcatttcgtaagccggaattcgggcattaccgtaagccggatgcggcacgcgcttgtacggcagcgcaaagacgctatccatctcttcggtagaaagcggaatagcaggcgggttgatccatacatagcggtcgccatgtttttgcatcaatgcgcgggcgcagcctgggttagtttcgtggtgcagaatgcgcgaagcatgggcgtacagcactttatcgcccttcactttctcgaaagaaggcagcaacacgtaggttttttcccacggtttcgggcgtggtggctgcacggttacagctttggcttcctgctttttcggagctaccggtttgttatccgcgcacggcaaatcttcgccatacggatgcgggattgggtcgattttccctggggtatcaagacgggtggaatccacaccgctccagccaggcaacgcctcttttacgataatcgcggtattacgcacatcgcggatttcactaatcggctcgcccatcgccagacggtgcgccacttccaccagcggacgctcgccgttaccgaacatcagcatgtcagctttggaatccaccaacaccgaacggcgcacggtatccgaccagtaatcataatgcgcggtacggcgcaggctggcctcaataccgccgaggatcaccggcacatctttccacgcctctttacaacgctgggtataaaccagtgtggcgcgatccggacgcttacccgcgacgttatccggtgtgtaggcatcgtcatgacgtaaacggcgatcggcggtatagcggttgatcatcgagtccatgttgccagcagtaacaccgaaaaacagattcggtttacccagacgcataaagtcgtctttactgctccagtctggctgggcgatgatcccgacgcgaaagccctgcgcttccagcatacgaccgcaaatcgccatcccgaagcttgggtgatcgacatacgcgtcgccagtaaccaaaatgatgtcgcagctatcccagcctagttgatccatctcttcacgtgacatcggcaaaaacggtgccggtccaaaacaggcggcccagtactgcggccaggagaacaggtcgcgatccggttggatcagggagatagagctcattttgcttccagaaatggtaaaaaaataatcaaaggccggggattatacgctgtatcacgcgcggaaatgaagtgatgttgatgaacggtggcgaaataccctggtgaggtttttcactgcccgacttgggcaagcacatttaaggctggcggtatcgtggcaactgccgctactatttatgccgctcagcaacgttcaaatcatattgcacgtcgatcggctatccgaggacacccacagtaaggcaaggtatggaacaggttattacaaagcgccgctattacgatattggtctacagattgaagagctgctgtattcaggcgtatttaaggccggagaacgcttaccttcagaacgtgaactgagcgagcggtttaataccagccgaactaccattcgtgaagccatcattatgctggaactgaaaggcgtattgaatgtgaagcaagggtcagggattttctttgtcgactccaccgataagctcaaccagaaatcattaatgccctattcagaaattggcccgtttgaactgttacaggcacgtcaggtaattgagagcaatattaccggttttgctgccagccagatcagctttaacgagttacaagagttgaagaaaatcattggattacaggaaaaagccatcgctgcggaaagtgataaatttgaagacctggatcaccgatttcatagcattattgccgaagcgacgcaaaatcgggtactcatcaaacaagctgctgaattatggcgggcagttcgtacagaaaacccccgctggaagaaacttaactacaagtacctgcatgaaaagcatttgcgtctgcaatggctggaagatcaccgggctattttcctggctctgcaacagaaagattcagagctcgccagggaagcgtcctggagacatctggaaaacagcaaaaatgaactgatcaaaatcttcaaacaagacgcttccatcagcgattttgatgactttttcttcgctcgttaaccttcattagtccagagctggcggaaaaaataacgccggctctgccttccgccctccactggtacacgctctctttttaattggtctaataaatcgactatcatcagatatcttagattagcggcaattatcctaaaaactgacctctaaaaaactttcctttcattttattcatataactcattgatacagatataaataacgccttgttgttctgtttcgtacttttacctttctctgcaagcgtgatgcatctctctgtttttggtctaatgaattatgtaaattggtatacacacaagccaccaggagtaagagcataatgtcagggaacgaaagtatcgatgccgcccactatgatcaggtaaccacctggcctcggggcgggttacaggcagatattgtccatattggttttggcgcttttcatcgcggacaccaggctgtctacacggatctcactaatcagctttctgacacccactgggggatctttgagatcaacctgtttggtgatgctcaactgatcgaaaacttaaatgcgcaaaatgggctgttttcggttgtggaaacatctgcatcgcaatctacctcacgccttgtgcgttcggtaactggcggtattcatacccccgtggatggcattgccgcagcaatccagaaattgactgaacctcaggtaaaaatcgtttcattaaccatcaccgagaaaggctattgtctcgattcgcaaacgcgatcgcttgatctcaccaatggattaatcaaacacgatctacaaaacccggatgcgcctcagtcggctattggcttgatcgtctgtgctttgcaacaacgtaaagcggcagggctcgccgcttttagcgtgctctcctgcgacaacttgccagacaatgggcatctgacgcgaaatgccgttctcggttttgcccgacaactggaccagcccctggctcagtggatcgaagaaaatgtctcatttccaggcacgatggtcgatcgcattgttccggcaatgaccgaatcgcaattcgccttactggaaactaaaaccggttatgccgatccctgcgggatcgtctgcgaatcatttcgtcagtgggtgattgaagataattttgtgcatgggcgaccacaatgggataaagcaggcgcgatgtttgtcagcaatgttcagccttatgaagagatgaagttacgcatgttaaacggtggccattcatttctggcctataacggctcactggctggctatgaatttatctggcaatgcatggaagacgctgattttcgttccattacccgccaactgatgattaatgaacaagcccgaacacttaatccagacttaaatatcgacgcccaggaatacgccgacctgttaattgaacgctttagcaaccgtaatgttgcacaccgtaccgggcaaatcgctatggacggttcacaaaagcttccccagcgtgcgctgacgccctggctgaaattgcatcagcaaaaacaaaacaatgctgttctgtcactgctcgttgctggttggttgcattatgtcattgaagctgttgagaaaagccagtctgtcgcggatccaatgaatgaacaatttcaggcgctaataaaggaacaacaagacgcatggcaacaggcgctcgcattactgcaccttagcgccatatttggtgatttaagcaaccatcagccatttataaatgaaataaaaatcgcctttgcaaatataaaaaacaaaggcatcaaggccaccatcagccaattattatcggatgagcagaaatgaaaacattaatttgtcagcagcctggcgttatggaatatgtggaaaaggatattcccacaccagcagataatgaagtgctgttaaaaataaaagctgtgggtatttgtggtactgatattcacgcttttgccggcagacagcctttttttagctacccacgtgtattaggtcatgaaatatgcgccgaagcggtttcgcgaggcagccagtgccaaacagcacaatcaggccagcgctattccgtcatcccatgcattccgtgtggcgagtgcgcagcctgtcgggaagagaaaacgaactgctgcgaacgtgtttcgctgtatggcgtgcatcaggatgggggttttagtgagtaccttgcggtacgtgaagacaaccttgtgcctctccctgacgaggtcagcgacagtgccggagcattggttgaatgtttcgccattggtgcacatgccgttcgtcgggcagagatcaaggctgaacaaaacgtactggtgattggcgctgggccaatcggtctggctaccgcagccatcgcccgggctaaaggggcacatgttgttgttgctgatattgactgtcaacgtcgccagcacgttgtggatcatctggcgattaatgccttcaatcccacacaggaagattttattgccgcgcttcgtgaggcctttggaggcgaactggcttgcgtagtactggatgcgacgggaaataaagcttcaatgagtcatgatgtcaatcttattcgtcatggcggcaaaattgttttcatcggtttgtacattggtgaacttgttattgacgatccgaccttccataaaaaagagacaacgttactcagcagccgcaatgccacacgggaagattttgcgttggtgattgaactgatgcgcagcaataaaattcacgaaaatttaatgaaaaaccaggcgttcaatttctttagtgttggcgaagattaccagcgtaacgttgtagaaaataaaaatatggtcaagggtgtgatcactttttaagggaacaaatatgacaactgtttatgtcagtgaagaaaatttaaaatcactggtgcaccacaaattacataccgccgggctggataccgacaccacacaacaggtgacagatgttttagtacatgccgatattaccggtgtgcattcacatggtgttatgcgtgtcgaacattattgcacccgccttgctgccggagggttaaataaagccccgcagtttagcattgagcaaatttcaccgtcagtggccattctcgactctgacgacggaatggggcattccgcattaattagcgccactgagcacgctattaaactggcccagcaagagggtctcggttttgttagcgttaaaaacacgtctcactgtggtgcgttatcttattttgcagagatgatcaccaacaaagggttggttgctatcgtaatgacgcaaaccgatacctgtgtggctccccatggcggcgccgagcgctttttgggaactaaccccatcgcctttggtttcccggtggaaaacagccatccgatgattgttgatatggcgaccagtgccacggctttcggcaaaatacttcatgcaaaggaaaccggaaaacatattggtgaagggctggcgatagataaaaacggttatggcaccactgatccgtataagattgaaaacctgctacctttcggccaacacaaaggttcaggcattgcactggctattgatgcactgactggcgtgctgatgaatgcgaattttggcaaccatattgttcgcatgtatggtgattatgacaagatgcgtaagctggcaagtttggttattgccatcgatccgaaaaagctcggcaatcctgtttttgcaaaaactatggcgaaaatggtcacggagctgcatgccgttaaaccggctcctggtgtcgaaaaagtgttagcgccgaacgatccgcaaatgcactacaaagaaaaatgccaacaggaaggtattccggttccggcaggaatattccattatctggcagagaattaatcactattttttattataacgatagaaaagcgctgtatttatcgtttctgttatattaaccaggagcaggatatgaaagcacttcgtcctctgacggcatcgcttatgctgttaaccagttgtttattaatatctaataccacactggcaaaaacaacattaaaactgagtcataatcaggataaaagccatgctgtccataaagcattaagctatttagcggataaaaccaaagagtattctaatggtgaattagttattcgcatttacccaaatgcgacattaggtaatgagcgtgaatcactggaattaatgaactccggtgcattacagatggttaaggttaatgctgcatcactagaatcatttgctccggattacagccttttcagtctgccgttcttattccgcgaccgtgatcactattatcgtgttctgcaaagtgatttaggtaaaaaaatacttaattcatcagaaagcaaaggttttgttggtattacgtactatgacggcggtgcgagaagtttttattccaataaaccgattacaaaacctgaagatttagcgggaatgaaaatcagggttcaacaaagccccagcgccattgcaatgatgaaagcactcggtggtgtcgctaccccgatggcgcaaggcgaactctacaccgcacttcagcaaggagtggttgatggcggagagaacaataccgttgtctatgccgatatgcgtcacgccgaagtcgcaaaagtctattcacgtgatgaacacaccatggtacctgatgtgttaattatcagcaccgacgtgttaaataaacttggtgataaagagcgcacggcattattaaaagcagccgatgagtcaatgatgcagatgaaggacgtcatctggcctgcggctgaaaaagaagcctacgacaaaatgaaagggatgaacgcaacagttgttgatgttgataaatccgctttcaaagaacgcgtcaaaccgttatacgatgaattcaaggcgaaagatgcacaatcagccaaaaaccttgagctagtagaaagtatgtaaccctaatgggcaggtaattcctgccttttcatggaagacttatgcgaacactcactcatattcttaataagatccttgccggatgttgctgcattattctcgccattatggtgttctgcgtaacctggcaagttattgcacgttttatttttaacgctcccagcactgtgcttgatgagttcacccagattttatttatgtggatgattttacttggcggtgtatatactgcggggttaaaaaaacatctggccattgatttgttggctcaaaaacttccggctgcatctgttctgacgcttgacagttttatccaaattattattacggtctttgcggttattttcatgatctatggcgggaatattgttgttgaaaaagcacaacatgttggacaaatctctccagtattaaaatggccaatggataaagtatattgggttatgcctgtcagtgggcttattctggtctggtattcagtaatgaatattattgacaactatcgtaaacggaattttcattaacgagggaaatatggactttgaatatatctaccccgtcttaattttatttggcagttttgccgtcatgctggcaataggtgtgccaattacttttgcgattggtctttcttcgctgttatctattattactgccttaccacccgatgccgccatttctgtgatttcgcaaaagatgactgtggggctggatggctttacgctattagccattcccttcttcgtgttagccggaaacattatgaataccggtggtatagccagacgactggttaacctggcgcaagcattagttgggcgtcttcctggctcactggctcattgtaatatcctcgcgaatacactgtttggtgcgatttcaggttcagccgttgcgtcagccgcagcggtaggtgggattatgtcaccactgcaagaaaaagagggatatgatccggcgttttcagcagcggttaatattgcctctgcacccattggcctgatgatcccaccgagcaatgtgttgattgtttattccctcgccagtggcgggacttctgtcgctgcgttgttcttagctggatatctgccgggcatcctcaccgctgttgccttaatgtttgtagctgcactttatgcccgacgtaaccattatccggtggccgaacgcatcaattttcgtcagtttttacaagtattccgcgaatcaattcctagcctgatgcttatttttatcattattggcggtattatcgccggggtatttacgcctacagaagcatcggcaattgcggtaatttatagtttagccctggcgatgatttaccgggaaatcactcttaagaagctcaatgatattctgttagattcggtagtaaccagttcaattgttctgttactggtaggctgctcgatggggatgtcatgggccatgacgaatgctgatgttcctgagttgatcaacgaactgattacccgcgtttcggataacaaatgggtcattctgtttattatcaatatcattctgttgatcgtcggtacctttatggatatcacgccggcgatcctgatatttacacctattttcctgccgatcgcccagcatctggggattgatccgattcacttcggcataattatggttttcaacttaaccattggcctttgcacaccacctgtcggcaccattctgtttgtggggtgcagcattggtaaggtcagtatcgacagggcaataaaaccattactgccgatgtttctggcattgtttgtagtaatggcaattatttgttatttcccgcagcttagtctgatgctgccaggattattttcgacctgatacacaatgaagactgcatactgagtaattttcaatgccccaccactctgtggggcattgaattggtccattacggtaccggattgaccaacagttgcccaatcgagccacggtccgccatttccagcgtctgactgttgaagtagaacgggaagtgcgcccaggaaggctgaccgaaataaacaagcagctccacttgtccgtcaacccaaacggtatctttccagcctctgtcttccgggaacggcatcgcgccattcacgttacggatctggaacatcacgccttcaatatggaacgcttgcggctcgtccgcgcgcaccgtccagcgttcccacgttccttgctgcgcggtgacatcaatacggttgacgtcccacagttgtccattaatacccgggtcatcacccagactaatatcgcgactgcgaatcggcgaaccggccatgatttcagttggcagcaagcgcatcggaagactgtcagtgaccagcggcagaaggccggttgggcgcagcgttagcaccagcgtagaaaccagaatgctggatggctcaaagaagccacgaatacgatcaacaatgctcgccgcttcgccacaggtaatcgacacttcatcaccgttgctcatatccaccagaatctcacgacgctcgcccggtgccagcgaaagttgcttcaccgatacaggagcgggcaggaatccctgatcgccagaaatcacatgtaacgggcgaccatcgctcatctgtagttgatagcgacgagagttcgacgcgttcaacagacgcaagcgcacccagccacgcgagacttcaacgtacgggctttgtacaccgttaaccagcagcgtatcaccaacaaagccgccgcttcccggttcgttgtattctggcgtaccaaagttatccagccgtttatcctgaataatgacaggaaaatcatccacaccataatggttggggataggcagcgatttactgacttcatcttccaccagccacattccggcaaggccgttatagacctgctgagccgtgcggttgggagtattggcgtgataccacagagtagctgcgttctggcgaatgggcagtacgggtgcccagtcagcgtttggcgacatcatccgtgccggaccgcccatcagcgggccaggtacctgtagcccggccaccgtcattgagacattttctgtcaggcggttgctgtaaataagcttaacatcgtcgcccttccagacgcggatagtcggccccaggtaacgaccattgattccccaaaccgacgcgcgtgtccctggcgtaaatgaccagtgcgcacgttgtacagtcataaacagcggttgcccacggcgagattcaagcagcggcggaacgggtagcggttgctgttgcccggctgcgctggccttcaggggaacagcgcctgcacaaagtgcaatccccgatgcctgaatgaactgacgccgactgagtgacatatttgctccatgtaaaactggctaaagtaataccgtgcaggaaagtgttccccgcaaaaatacagattgccgacttaaacttttccggcggcttcgcgttctgcgacttctttatcgagctcggcgattttttgttccattatcgaacgacaatgggcagccaactcgcgaacctgatctttgccatactgactgacgtcaattggcggcagcatttcgacaatcaccagaccgttgtgtagccgattaagattaatcttattcgaagttgtagagacgcacacgggtataatcgggacgcccgccgcaattgccgcgtgaaatgccccggtcttgaacggcagcaggccgcgaccacggctgcgggttccttccgggaacatccagatggaaatacggcgttttttgaagtgattcactacttccgcaatagtgccgtgagctttagtgcgattgtttctgtcgatcaataagttgccggttaaccagtacaactgcccgaagaaggggatccacagcaagctctttttacctaccgtcactgtcggcggctgcacaatgttcgatgccgtcaccatgtcataattgttctggtggttagcaatatagatagcattgccgtagctttcagcgtctgcaggtttgcggcactccactttcaggccgaaaagcggcgcaagacggccaaacatatgcccaaaggtggccacatgtttcgggttacgcgggctgaaaaggcagtaaatggagccgaatacacagactaagatgctgtaaatcacggtaataataagacgaaagatatatagcataacaccctctgaaggtctgagagactggcattgtacgtcacctgaaaatcaggttagggcattgttaaaagccgctctctggaaaagcgtattgttaatcgcaacgcatgaataaacaacggtttcaagggaatttttatcgtttccgggggttgaatacgctgccggatgacgacttaacgtttcatccggcgttccttgcaagcgggaggaaacagcgccctccccggcatattactcttcgctatcaccgctgctggcacggcgaggagagtcgatctcaacacgatcgatacgctgcaaaccgcgcatcaacgtaccgcggcgtccacgttcgccagtgactttctgtagctcttccggacgcagtttaattttgcgtttcccaacatgaatggtcagcgtgctttgcggcggcagaacgtacagttgcgccaggccatcctcgccacgcgcggcttctgccgatggaatgttgataatcttgttgcctttgcccttcgacagctgcggcagatcgcttaccgggaacatcaacatacggcctgcctgagtgattgccagcagcatatcggaagcatcttcaatcaccaccggcggcataacatgggcattttccggtaaggtgatcaaagccttacctgcacggttacgcgccaccagatcgttaaaggtgcagacgaaaccgtaacccgcatcggaagccatcagcagtttctgatcgtcgctttccatcagcatatggtcaacggtcgctccagggggcaacgttaatttgccggtgagcggctcgccctgaccacgcgccgacggcagcgtaatcgggtcgatggcatagctacgaccggtggaatcaacaaacactaccggttggttgctcttacctttcaccgccgctttgaagctatcgcccgctttataattcaggcccggcgcgtcgatatcatggcctttagcgctgcgtacccagcccatctgcgacagcacaatggtgacaggttcagacggcagcatgtcgtgctcgctcatcgctttcgcttcttcgcgttcctgcaacggcgaacgacgttcgtcaccgtaggcttgcgcgtctgcctgcagttctttcttcagcaggttattcattttacgctcggaagccaaaatgccctgcaactggtcgcgctctttttccagctcactctgctcaccgcgaatcttcatctcttccagtttggcaagatgacgcagtttcagttcgaggatcgcttccgcctgggtttccgtaaggccaaaccgcgacatcagcgccggtttcggttcatcttcattacgaatgatctcaatcacttcgtcgatattgagaaacgccaccagcaaaccttcgaggatatgcaggcgcttgaggactttctccagacgatagttcagtcggcggcgcacggtatcgcggcggaacaccagccattcggagaggatttccagcaggtttttcaccgccggacgaccatccagaccgatcatattgaggttaatgcgatagctcttttccagatcggtggtagcaaagaggtggttcatcacctgatccatatccacgcggttggaacgcggcacaatcaccagacgggtcgggttctcgtggtcagattcatcgcgcagatcgtcaaccatcggcagctttttgttgcgcatttgcgcagcaatttgctccagtacgcgcgcacctgaaacctgatgcggcaatgcgctgataaccaccgcgccatcttctttcttccacaccgcgcgcatacgcactgaaccacgtccgttctcgtagattttacgaatctcggcgcgcgaagtgataatttccgcttcagtcggataatccggcccctgcacgatatccagcagctgatcgagcgtggttttcggttggtcgattaatgcgattgccgcctgagccacttcacgcaggttatgcggtggaatatcggtcgccatgccgacggcaataccggtggtgccgttaagcaaaatgtttggcagacgggcaggtagcattttcggctcctgcaaagtgccgtcgaagtttggcacccagtcagccgtcccctgccccagctcgctcaatagcagttcggaatatttcgacaaccgggattcggtgtaacgcattgccgcgaacgatttcggatcgtccggcgcaccccagttcccctgaccatcaaccagcggataacggtaagagaacggctgcgccatcaggaccatcgcttcataacaggcactatcgccgtgcggatggtatttacccagtacgtcaccgacggtacgggcagattttttaaatttggcgctggcattcaggcccagttcagacatcgcatacacaatgcgccgctgaacgggtttcagaccatcaccaataaacggcaacgcacggtccatgatcacgtacatggagtagtttaagtaggcgttttccgtaaattcatgtagcgcaaggcgctctgccatatcgctcattaattctgattcctcaacttattcgccagccttcaaaggggcaatattgccggagatactacattatctgccgcgtcgagtcacaggagatcagcgtgaatagcgccgccggacgtgctccgacggcgataaaggcatcaatgtgccttgatatacaactctttgctgtagacataatcctggggattatgcagcggaaaaccgccaacgtagggtttaagcagtttgattaacggctgatagtagatgggaatcagcggtgcctgctggttgatgatcacttctgcctgctgatacaacgcattacgctttgttgcatcagtgatctgcgtggcctggtttagtaaggcgtcatactgcgcatttttccagtgaccgacgttttcttcactatcgcttttgagcgtgttcaggaagctggaggcatcattgtacgtcgcatcccacgactgccgagacagcataaaatcaccggctcgtcgggcatcaagataggttttccactccattgtgcgcagcgtcacctgtgcacccagccattttttccattcggaagacaacgctatcgcggtcttttcatgcagatcgtacttgttgtagaacagctcaaagcgtagcggatgagaggcgtcgtatcccgcctgtttcagcaagacttttgccatcgcgacacgctcactcattggcttttgcagttcatcgaacgtcgtcgcgctaaagccttttacctctggcggcgtcagcgtggttgcgggcgttctcaaccccagtaccttttgcgcaataagctgtcgatcaaccgtaagatatagcgcccgacgcacccgcacatcgttaaatggcggtttctcaaggttaaagttgtaatattcgctgttcagacgcgggataattcgtagctcgccaggcagtgatttttcaatggcgggaatttgctgcgccggaacccaggtgagatcgacctctcccgcgcgatagcggttatagccggtgaccgaattatccagcgccagatactcaacctgttgcaatactgtatgttgcgcatcgcggtactttggatttttgcgtgcagtaatcttttcgttaactacccatttatcaagcacaaaggcaccgttgtaaaccatgttctctggcttactccagctatcgccatgtttagcgatgacatgatgaggaaccgggaacagcgtcggccaggcgagcatcgtcgtgaaccaaggaactggctgctcaagcgtaacttcaagagtacgatcatccgtcgctttgacacccagcgatgtaacatctgctttacccgcaacaatagccgcggcattgttaatgtgcgcctgtgccagatagccagcaaaagggcttgccgttttcgggtcaaccgcgcgctgccagccgaggacaaaatcctctgccgtcagaggctgaccgtctgaccactgcaaaccgctacgcagatggaaaatatagcgcttgccgccgtcaagtatctcccagcgttcagcctgagcgggctgcacctggccttcaccgtccatccataccagaccttcaaacagatccagcacaatctgcgcggcagtattctcctctaccttttgcgggtcgagcgtgcctgggtcgctatgattgttgtaacgaaagacttgttgcggggcgagcggtgtgttggcgggaacgtcagcagcgtagagaggagccgcacttaccaggctgaccagccataataaatttcgcgtatacatggtattccttaccggagaaattataagcccgacaacaatacgcctgtggcattgtttgctcaaacttatcgcgagtgatttggctcacactccggtaaagattccccatcacgccaacggcacataaatatccgtttccagtcgccgctctgtcatctcttcggcaagattggtgtagtgaaacaggatcggggctttgcgcattttttcgccgcttgcaggtagccagtggcgaatgatgccccatatcgtgtgtgaaatatcgtccagctcgccaacatggcgggcaacagcataacgcccaccggtaagttcgccattactcacgccataacgattatcggggatcggttcgctaacgctgccgcagatatcaaagcgaaacgcttccggtgcggtggtggcagggtcgtcccaggcgacgccaaaagtctggctttggttaacaggagaaagccccgtctctttacgccacatgataaatttcgccacgctgtagttgagcaactcagggctacagcggtgcggcaacatcgccacagggattgatgggaaatcgataatatttacatccagtgtcaggtttgtcattttgcctccctgcgaaattattcccgggaacgcgtcccgggagcggtaacaattacggatttactttgcggatctgtttgacgtcaatttcaacagaattccagtctttatcgacttccccctgaatctcaaccgtatctttcggcgtcaccgtcacgccgttccagcgtttgtggtcgatatcaacattgatagtaccgctggcatctttgaacacatagagatcgtcagagatgcgttcaacgatattgccgcgtagggttacccaggtgtcgtcacgcagggattttgcgctttctacggtcgttacgctgccgttcggcccctggaatcctccggcctgactttgcgttgtcgatgggccagaaaaacctccctgctctgctgccataaccggtgtactgcacagggccattactgcgattactgctgcgaattttttcatgtttattactccctttaatgtctgtttccgagcatttaacaagatagtccttaacaacttcttaagggaaaaaaataaaatttaatgctgtacagagcgcgttacaacacggtttactggcagcaaatacggttatcgcagggatgaaaaaatgcgaattttactgatagaagatgacatgctgattggcgacggcatcaaaacgggccttagtaaaatgggttttcgcgtcgactggtttacacaaggtcgtcagggaaaagaggcgctatatagcgcaccttatgatgcggtgatcctggatttaaccttaccgggcatggatggtcgcgatattttgcgcgaatggcgagaaaaaggtcagcgtgagccggtattgatcctgactgcgcgcgatgcgctggcggaacgtgtagaagggctgcgtctgggagctgacgattatctgtgtaaaccttttgcgttgatagaagtcgccgccaggctggaagctctgatgcgccgaaccaacggccaggccagcaacgagctgcgccacggcaacgtcatgctagaccccggcaaacgtatcgccacgctggctggcgaacccttaacgctgaaaccaaaagaatttgccctgctggaattactgatgcgtaacgctggtcgggtactgccgcgcaaactgattgaagagaaactgtatacctgggacgaagaggtcaccagtaatgccgttgaagtgcatgtgcatcatctgcgacgcaaactcggcagtgattttattcgtaccgtgcatggtattggctacacattaggtgagaaatgaaatttacccaacgtcttagtctgcgagtcaggctgacgctaatctttttaattctggcctcggtgacctggctgctttccagctttgtcgcctggaaacaaacaacggataacgtcgatgagttgttcgacacccaactgatgctgtttgccaaacggttaagtacgctcgatctcaacgaaatcaacgcggcggatcgcatggcacagacgccaaataaattaaaacacggtcatgttgatgacgatgcgctgacttttgccatctttacccacgacggcagaatggtccttaacgatggcgataacggagaagatattccctatagctatcagcgggaaggttttgctgacgggcaactggtcggtgaagacgatccctggcgttttgtctggatgacctcacctgatggcaaatatcgcatcgttgtgggtcaggaatgggaataccgtgaagacatggcgctggcgattgttgccggacaattgatcccgtggctggtcgcactgccgattatgttaatcatcatgatggtactactgggtcgtgaactcgcgccgctgaacaaactggcgctggcactacgtatgcgtgacccagactcggaaaaaccactaaacgcgacgggcgtacccagcgaagtgcgcccactggttgagtcgctaaatcaactgttcgcccgcacacatacgatgatggttcgtgaacgacgctttacctccgacgcagctcacgaacttcgtagcccgttaacggcgctgaaagtgcaaaccgaagttgctcaactctctgacgatgatccgcaggcgcggaaaaaagcgctgctccaattacattccgggatcgatcgcgctactcgtctggttgatcaactgctcacgctatcgcggctggactcactggataaccttcaggacgtcgcggagatcccgcttgaagatctcctgcaatcgtcggtgatggatatttaccacacggcgcagcaggcgaaaattgacgtgcgactgacactcaaagccaacggcatcaaacgcaccggacaaccgctattgctaagtttgttggtgcgaaatttgctggataacgccgtgcgttacagtccacaaggtagcgtggtagacgtcacgctgaatgccgataatttcatcgtgagggataacggccccggtgtgacaccagaggcactggcgcgaattggcgaacgcttctatcgcccacccggacaaaccgctaccggcagtggacttgggctatcgattgtccagcgaatcgccaaattgcatggcatgaatgttgattttgggaatgcggaacaaggtggatttgaggcgaaggtaagctggtaacttctctgtctatgagagccgttaaaacgactctcatagactttactaatagcaaaatataaaccgtccccaaaaaagccaccaaccacaacccagacaaataacgagcgagaatacatatagccaaaactcgaacatttcccgcataaagagttttcttaagataagaataataagtggtgtcagaagaaaaaatgctgcaatcattgcttgcaatatacgatcttcgcctgaaacagaaggtatactgcaaatattgtctcccgactcaagcatccagtcatacttattgaaagcaaaaaaagaatctattaaccaataagtaagcattatatataatagtgcttcaaatattgatagtagttgtttttttaacatatctgattactcattaatcaattttttgatatgttctctaatctctaacaacctcataccataagagatgaatttataatcatctgtatcacgcgcaggcaaattattaattaaacaaataaaaaaacccaaatctcgttcaacaccacgattatatctaataccagccataatatactgctcattcgtcatatacagtgttgccgaagagggataatcaaaaagaacaagatctcttaaataagtagcagcaatttgaaaggtaaaatcatcctccattaggcatgtcgctaactctaactgatttctggtagttaattctgaagggtctagacctagagtaatcgctgcggttcgtatttgtatacccattgagccaaatgatgttttattttcaggcatatctaacaatccgatcattctttttgtttcatatatctgaaacttataattttcaggcatacctcctgactcaatccaggccacgccgcccagtaactctggacgaattccagcggcgtatgcatgtttaattattttgtctctattatattgtacatatgcatctttataagcatttaaataatatactcctgaacggcgacgcgaatcattttttcctaacttccagagtaaaacgtccatttcatcccatttacggaacttcgcttgtggaattgtacaatatctattttttatagtgagatcgcttttcatatttaaaaaatcctttcttcccaacaactatatgattccgtactcgcgatatggtgcttccatgttatatttttataattaagaacaatgacatcttccggctgattacccgcatgtgtaattgagtgtggataacatgtcagaatattcgataaatgtgctccttgcaattcaattgtgtaaaacctttcaatacaaccgccagaattaattctataaaaattaaatacagctgataactcttcattttcagaaagagcggcatttaataaaggggaggatttatctattggcttgtaaaattttatggggtgatgcactacattatactctcgacttaaagaatggtcgaactgtaaaacaaaaatttcatccacatgatttatttgatatttattaccaatagatgcatacgaaccacaaccctcagagatcaaaccttgtattttccctttaattgataagtatatcatatttgacatatatattctccataatcattttttccgaaaaactcctgtatcatttgcataatacatctctcctgtgggagcttatgggaagttgatttaagtattgtcattttcagaaaatatttatcccgcatcggtgaatcagagaaagatcagacttttgctaaattcgcaaaagactttgcacattttgctaatttcaccgtaccgctctgtgacgtactatagtcggcaaacgtctcaccttgaggttaaaaaatgagcaacatcctgattatcaacggcgcgaaaaaattcgcccactccaatggtcaactgaacgacaccctgaccgaagtcgcggatggcacactgcgcgacctcgggcatgatgtccgcattgttcgcgccgacagcgactacgatgtcaaagcggaagtacaaaactttctctgggctgatgtggtgatctggcagatgccaggctggtggatgggcgcgccgtggacagtgaaaaaatatattgatgatgtattcaccgaaggtcacgggactctgtatgccagcgatggtcgtacccgcaaagatccatcaaaaaaatacggttccggcggcctggtacagggcaaaaaatatatgctttcactgacctggaacgcaccaatggaagccttcaccgaaaaagatcagttcttccacggcgttggtgttgacggtgtgtacctgccgttccataaagcaaaccaattccttggcatggaaccgctgccgacatttatcgctaatgacgtgataaaaatgcctgatgttccccgctatactgaagaatatcgcaagcatcttgtggaaatttttggttaactagagctctggctttagaaggagttaaccatgattacagtaatcgcagaaatccgtactcgtcctggtcaacatcaccgtcaggcagtgttggatcagtttgctaaaatcgttccaaccgtactgaaagaagaaggttgccacggctatgcgccaatggtggattgcgctgctggcgtgagtttccagtctatggcaccggattctatcgtgatgattgagcagtgggaaagcatcgcgcatcttgaagcgcatctgcaaaccccgcacatgaaagcatatagcgaagccgtaaaaggtgacgtgctggagatgaatattcgtatcctgcagccggggctttgacatttctaaaaagaggccggtgctgctaccggtctcagcccagattagccattctttcttcccgttttcagtcctcgatggaaatcgttaattcgcttaatggttttaaccgcacgctgcggcactgcggaagctaccgaccagacaatcatttccagacacaacaataccgtaccatgtagcggcgttttccctttttcatccccgcgcggaacatgaatcacgatactggcgtctttgctaaaacgtgaatccagcgcgtttgtcagcaaaataacagggatccccagccgcctcgcctcacgaagcgttgtcagcccttcccggtgcgcagatttttgcgccatcatgatcagaacatcgccacgttgaagcgcgatcagttgctcggcaaggccaatacccgtacggtttagtgccgtggcaggcaaacctatgcggttgaatagtcgtgcggtatagtccgccagaatacccgaagcgccaataccaaaaatagcgacttgccgtgcctgcaccaacaacgctacagcttgcgcaagcgcgtggcggttttcaggctctgacaggacattacaggtatacaaatgcccttcaagaacaaagtcgattgcggtgttaacatcgctcgtcaagttactcaccgtcgtagacatcttttcgctggaactaagggctggaccaagccactgttccagagtgcgtttcagatcacgcagcccggcaaaccccagggcctgtatagccctgataactgtggcatcggaagtgttcaacgtggccgcaatttccatcgccgtttgctcgagtaccacttcacgatgctcattaatgtagctggcgacaactcttaacccaggcgttaactgactcgcgcgagtgcgaaaacgctcaccaaaaatatcaacccgcactttatctttctggatcatttatcttccggtagaggtcgccctgcaatttgtgattgtatctgcgcagccatcagccccagagatgcaaaggagttagaaattgcctcttcacgagaaatcagcacataacgcccggaacgacaggcagtcagaaactgacaccatcccggcatgactttttccattgctgccagctcatcctgaggtttaccaccggtgtcaccgcgccaggttgcaaaaacaaaatcggcatccagttcaggtaaacgctccgcgctcacatccattcgcccaccttcaggaatgctctcaatcagcggcggaaaacgaaaaccagcatcgcgtaatacccgtcccagcgaatgatagctatgcatcacattaatttttccctggtttgcctgaatcaccgataccgttattttttggctgtccagcgtcgccttcagcgcattgatttgtgcctgatagcggcgttcaagtatcgccagctgcgactgcgttcctgtaagttctgccagcttgcgatagatttctggcgcgccccctttgagatgatcaatgctcaccgtgggcgcaattttttcaagttgttcaatgggcgtattacgggtcggttctgtgatgatcaggtcaggctttgccgccacaatcgcttcaatatcaatatcagcggtaccaataaaggcgatcgatgaattatcaaagtcgacacctgtcaataacgcgccagatcgaatgaaatggctaccgtcaggccgagttcgcccgtggctggcgacaggaggtacaccgagctcaatcagaggaatagtgatatcaagatcgtgtaaagagacaattctctttggatgagcaggaacagtgactttgcgccctaaatcatcagtaaatacctgaacaggttctgttgcacgggaaaaaaatgacaacagtatcagcagagaaaaaaataaacgcatataactcccgttaaaaactgttcctgcgctgccagagcagtagcaaaaaaaatggtccaccaatcagtgagataatgattccggcaggcagttgcaaaggcaaaaaagccaaacgaccaatgctatccgccagaataactaacaacgcccccgataccgcgctccccagcagtaatgtcgtctgcccgccacgtagaataaaacgtgatatatggggtgctatcaatccgacaaaaccgatgttaccaacacacgaaacgcagacggctgtcaggattatgggtgcggcgacacgtaacaacgccagacgagaactattcacccctaacccggttgcaacctgatgaccaagcagagcgatatccgcagtcctggcggtgaacagcaataaaagagcggctggcaacatccaacaggctgaaataccgactaacatccagttagctgcatgcaggcttcccgataaccacatcaatgcagtttgtacatctcgaacatctgcagtggtcataaatacaccgataccggcggcgaaaaaccaggaaacaccaataccaatcagaacaaatcgcgggcgggaaatatcgcgcgcacaaaaaatcacgattaaagccaccaacaggccaccagcaagaccagccactggacgccagaacattcccagcattggaaactggaaaatcagccacagcacagccacgctacatccttctttgacgccgattaaaccaggatcggcaaggccattacgtgcaatggattgcattgcggcccccgccatacctaacatggccccgcatagcaatgccatgatgactctcggcaagcgaatatcctgcacaatataacgtgcgtctgtgcttacgttttctggagcaaacaacgctcgtcctacttccgatgccggaacaaagaaagaaccctgcatcagaccgaatatcagtattccaaccgcaaacagaaacaacccaccaagcaacaccagatttttagggcgtaccagtgtcgaaaacttaccaacacgtagtggtcgtagcccgacgttcattatccgactcatttgaacatcctcgtcgccataatgacaaaaacgggcgcaccaactaacgccgtcatgacaccggtcgctaactcatggggcgtgaaaagcgtccgggcaataatatctgccagtaataacaaaagtgcgccgacacaagctgaaagagggagcagaacgcgcagatccgctgataccagacgccggacaatctgcggtactagcaggccgacaaaaccaatggggccagcaatcgatacggctgcgccacagagcaacgcgatcgcaagcagggtaaatgttcgcgtgcggagtacagagacgcccagcccctgcgccatgcgatcgcccagtgccaacatgttaagggagggtgcaaggtaaagggctaacacaaatccccccagagaaaaccaggcggacgtacccagcgtcgcccaatcctgccccgctaaatcacctgctagccatgtccgcatcgccagcagtgtttgttcgtcaagaatcaggattgcagccgttattgaggacacgaacgccgatagcgccacgccgcataaagtaactttcattggcgttacccctgaacgccctgcggaggaaagcagcaatatcaacaggaacaataacgcgccccccgtagatgccagcagtgggcgtccaaccggaaaggccagtccaagcgcactggcggcaacgacagcaagagcggctccggcatttaagcctaaaatatgtggctcccccaatgggttacgaatgacagcctgcaacaaagcaccagcaacaccaagagaagcaccggtaagcaatgctgccgctaaacgcggcaaacggagtcttacaattacgttgtgatcgaagttttgcggatcaaaatgaagaaatgcctgcaacaccgtttgtggtgcaataaatcgggcaccaatccctggatataccacgcatcccaccagcagtaaggcgaggaaaattacagtaaccagccctgtgcgcatcatactttttctacaccacgaaacggcatgaagaacggctttcccgtcagaggatttattgatgcgtgaacatcaacgtcaaagaccgcttttaccagttcaggcgtgcaatgctccccctcattcaacacacgcaccactttcccctggcgtaaaaatatcaacgtatcgccataattgacggcaaaattcagatcatgcaacaccacgacgactgtacgcccgtgatgacgcgttaaatcatgtaataactcaagaatttcaacctgataacgtaaatcaagccaggttgtgggttcatccagcaggatataaggcgtcttttgcgccaacaccatcgcaatccagcaacgctggcgctgcccaccagagagtttttcaacaggtaaatgtgcaaactcctgcgtaccggttaatttcagggcatcttccaccgcctgctcatcggcgtcgctccattgacgtatgaaattttgccagggaaaaagcccacgcgacaccagttcataaacggttaagccctccggcaataatggcgactgcggcaagatcccaagtctacgggataacgctttcgttggttgctcgtgaatcgctttgccatcaagcaatatcgaaccgcccataggttgcaagatacgtgcaatggtgctgagcaacgtcgactttccacagccgtttgccccaaccagaacggtcattttttctgtgggaacggagaaagaaacaccatcaacaatgatcttcttgtgatacccggcagaaacattgtcgaggatcagcccctgcccttttgcgttatgtgccacgtgtacgccaacttaatcaaagacaaacaaaaataaaactcattctcctttgagagtttgacgccacaaaatgtagtagtcaagcagttaaaagccacacaaaaacaaggtaaataacaggtaaactatttttatacataaaaataaaaacattaaatatcaataaattaaaagcaatcaaattgtataaacttttcataaaaacacatgtagcaattttttgttatttctcatttactactacattactgcgtgattgaatgattctcaattacatatccgatggcgaaataacaaacggatagtgcttagtgagcaataagaaacaattttcactcgcgacaatccgcgagtttttgggataacagactaaatggctatgttcacaccttcattctcaggactcaaaggtcgggcgctcttttcactgctttttgcggcaccgatgattcatgcaacagactctgtaacgaccaaagatggcgaaacaatcactgttacagcagatgcaaataccgcaactgaggcaaccgatggttatcaacctctgagcacctccacggcgacattaaccgatatgccgatgctggatatcccgcaggtggtcaatacggttagcgatcaggttctggaaaaccagaatgcgacaacgctggatgaggcgctttataacgtcagtaacgtggtacagaccaatacattaggcgggactcaggatgcttttgtacgccgtgggtttggcgcaaaccgggatggctccatcatgaccaacggtctgcgaaccgtacttcctcgtagtttcaacgccgcaacagagcgtgtggaagtgctaaaaggcccggcctccacgctgtatggcattctcgatcctggcggactgattaacgtcgtgaccaagcgcccggaaaaaacattccatggttcggtttcagccacctcctccagttttggtggcggcactgggcaacttgatatcacaggtcccattgaaggcactcagctggcgtatcgccttaccggggaagtgcaggatgaagattactggcgaaacttcggtaaagagcgcagtacatttattgccccgtcactcacctggtttggtgataatgcaacagtaaccatgctctattcccatcgggactataaaactccattcgatcgtggaacgattttcgaccttacgacgaaacagcccgtaaacgttgatcgaaaaatacgttttgacgaaccgtttaatattacagatggtcagtccgatctggcgcaactcaacgcagaatatcatctcaatagccagtggacagcgcgctttgattacagctacagccaggataaatacagcgataatcaggcgcgtgttaccgcgtatgatgcaacgacaggaacactgacacggcgtgttgatgcaactcagggatctacccagcgtatgcatgctactcgtgcggatctgcaagggaatgttgatattgccggattctataatgagattctgggtggggtgtcatatgaatattatgatcttctgcgtacagatatgattcgctgtaaaaaagctaaagatttcaatatatacaaccctgtttatggtaataccagcaaatgtacaacggtttcggcgtcggacagcgatcagacgatcaaacaggagaactactcagcttatgcacaggacgcgctctatctgaccgataactggattgccgtcgccgggatccgctatcagtattacacgcaatatgcgggtaaaggccgtccttttaatgtcaatactgacagccgcgatgaacaatggacgcccaaactggggttagtctacaaactgacgccatcggtatccttatttgccaattattcgcaaacatttatgccgcagtcgtcaattgccagctacattggcgatcttccaccagaatcatctaatgcttacgaagtcggggcaaaattcgagctattcgatggtatcaccgcagatattgcgctgtttgatatccataaacgtaatgtgttgtataccgaaagtattggtgatgaaaccatcgccaaaacggcaggccgcgttcgttcaagaggggtagaagtcgaccttgcgggagcattaactgaaaacattaatatcattgccagctacggctataccgatgcaaaggttctggaagatcctgattatgcagggaaaccattgccgaatgttcctcgtcataccggttcgctattcctgacctatgatattcataacatgccaggcaataacacactgacgtttggcggtggcggacatggtgtaagccgtcgttcggcaaccaatggggctgactattatctgcctggctatttcgttgccgatgccttcgccgcatacaaaatgaaattgcagtatccggtcactctgcaattaaacgtcaaaaacctgtttgataaaacgtattacacctcttccatcgccacaaataatctgggcaaccagattggcgatccgcgtgaagtgcaattcacggtgaaaatggaattttgatcaaaaaagcccggtatacacttgtataccgggctatgttttattcttctggcgggaggattatcagacctcaatctctgccatgtcgcctttttcttgcaaccaattgcggcgatcttccgagcgtttcttcgccagcagcatatccatcatcgcgtcagtacgctgatcgtcttcatcatcgatagtcaactgcaccagacggcgagtgttcggatcaagcgtggtttcgcgcaattgcatcgggttcatttccccgagacctttaaaacgctggacgtttggcttgcctttcttgcgttttaattgctcaagtacgccctctttctcttcttccgtcagcgcgtaataaacctctttcccgaggtcaatacggtagagcggtggcagtgcaacgtaaacgtgaccgtgtttcaccaatgcgcggaagtgttttacaaacaaagcgcagagcagcgtggcaatgtgcagaccatcggagtcagcatccgccaggatacagatcttgccgtaacgaagctggctcaaatcgtcgctgtcaggatcgataccgatagctaccgaaatatcgtgcacttcctgcgaagccagcacttcgtcggaagagacttcccaggtattaaggatcttacctttcagtggcatgatcgcctgatattcgcgatcgcgcgcctgcttggcagatccgcctgcggagtcaccttccacaaggaatagttcggtacggttaagatcctgcgcggtacagtcagccaatttaccaggcaacgccgggccgctggttagctttttacgcaccacttttttagccgcacgcatacgacgctgggcgctggaaatcgccatctctgccaacagctccgccgcctgaacgttctggttcagccacaggatgaaggcatctttcaccacgcccgaaacgaatgccgcacactgacgcgaagagagacgttctttggtctgcccggcaaactgcggatcctgcatttttactgacagcacataggcgcagcgatcccagatatcttccgccgacagctttacaccgcgcggcagaatgttgcggtattcacagaactcacgcatcgcgtccagcaggccctgacgcaggccattaacatgggtaccgccctgcatcgttgggatcaggttgacgtagctttcggtcagcagttcaccgccttccggcagccacagtagcgcccagtccaccgcttcagtatcgccagcgaaattaccgataaacggtttttctggcagcgtcggtaaaccgtttaccgcttccgccaggtaatcattcagaccgtcctgatagcaccagcgctgttcggtgttgttgatctcatctttaaaagtgatctcaacgcccgggcacagtaccgctttggctttcagcacatgcgtcaggcgtgaaacagaaaaacgcgggctgtcaaagaaggtttcatccggccagaagtgcacgctggtaccggtattgcgtttaccgcaagtgccgacaacctgtaaatcttgcaccttttcgccattttcaaaggcgatgttatagatctgaccatcgcggcgtacgttaacttctacgcgcttcgacagggcgttaactaccgaaatccccacgccatgcaggccgccagagaactggtaatttttgttagagaatttaccgcccgcgtgcagacggcaaagaatcagttcaaccgccggtaccccctcttccgggtgaatatctaccggcatcccgcgcccatcgtcaatcacttctaacgactggtcggcatgtaagattacatccacgcgttttgcgtggcccgccagtgcttcatcgacactgttatcaataacttcttgccccaaatggttagggcgagtggtatcggtatacatccccggacggcggcgaaccggctcaagcccggtgagtacctcaatggcatcagcgttataagtttgcgtcatggtttaagttagcaattcgagttgatcgtcagagatggtgcagaccaagaaaatcgacgatcgggttgaaataatcttcgaagcccgtgaatgcgtggttgccgccttctatgacagtctggcggcaggaagcgtagtacgccaccgcctggcggtaatccagcacttcatctcccgtctgttgcagcagccagatcaaatccggcgcttccagcgggtcaatctgcatgactttgagatcgtaaatatggcgtgactctagcacatattgctgcccggtgtaggggttctcgttctgaccgagatagtccgtcagcagttcaaacgggcgcaccgccgggttgaccaccactgcgggcagcataaaacattgcgacaaccaggtggcgtaatatccccccagtgacgaaccgacaatacccagcgaatcgccgccatgttccaggacaatggattccagcagttctgccgcgtcagaaggatacggcggcaactgcggaatgatcatctcaacgtcagggtgatgttccgccagccagttttttaacaagctcgcttttgcagagcgcggcgagctgttgaaaccgtgtaaataaagaagcgtagacatcagtagccttctgaagcggtatcaggttggaagcgtgcgtccgccaggcgatgcacctcggtggtcagcgtgccatcagcatgtaactcgagagtacgccagccgggcgcgatggtgtccagcgtaaagttagaacagtgcggcttaaactgcacacaggtcgacggcgttgccagcaagcggcgaccgttccagtcgagatccagctcctgatgaatatgaccgcacagcaagtatttgacgtgcggaaacttcgccagcacggtatccagttcgcccgcgttacgcaggctgtgttgatcaagccaactacaacccgcaggtagcggatgatgatgcagcagcagcaacgtatggcgttctggcgcatcggccagtttacgttccagccactcaagctgaaactcgctcagctcaccgtgcggcacgccaaacacctggctatccagcaacaggatttgccattgctcaccaataaacacgcgcttcgccggggagatacccgcatcctgtaacgcgctgtacatcgcgggctggaaatcgtggttgcccggcagccagacgcagggcgcacgaaaacttgcgatgccttcagcgaaatgctgataggccgcagaggattgatcctgcgctaaatcacctgtcgcgacaatcaggtcgaattcgtgctggtgtggccgaatcgcctccagcaccgcctggtagctttcccaggtgtttacccctaacagggcttcgtgcttttgtgcaaacaggtgagtgtcggtaatttgtaaaatcctgactctggcctcaccagccagaggaagggttaacaggctttccaaatggtgtccttaggtttcacgacgctaataaaccggaatcgccatcgctccatgtgctaaacagtatcgcaaccagtccgctaaaaactgattaatttgatgcttttcgtcgcgttgatgcaactttttattaggataatcataccgcgctttgaagcgaaaaatctgctggcttgaacacacttcagccaccatcgcgtcatgatacagacgcaccgtcattgacggaaggctccagtaactgatcgcgggcgcagtctgttctattgtcaccagggtagtgtatcgggtcgattccacaatcgtcagccgatattgtgcgtttgccacctgatagcttacagtttcgccgggtgcgtcattgcgcggtaacaaacggcgcaattgtgaaaagttcatctcgcacaggcgcatcatttcaggaaagtcaggtgtgtaacgcttcatttatgcccactcattttttaacgcttgatgatgcagctgcagccattgcaaagcgatgaccgacgctgcgttgtcgattttcccctcttctacccactggtatgcctgttcccggcttaccacatgaacgcgaatatcttcgttttcatcagccagaccgtgaataccgcttgcggtcgtggcgtccacttcgcccaccataattgacgaacgctcactggtgccccccgggcttgccaggaaacttaacaccggtttggtccgtttgactatcagtcccgcctcttcaatcgcttcgcgacgggcaacatcttccacactttcaccctcttcaatcatcccggcaaccatctccagtagccagggggtttcgctggtgtcgtacgcggcaatccgaatctgctcaatcagcacaacttcatcacgcactgggtcaaagggtagcaagactgcggcgtgaccgcgctcaaaaatttcccgccgtacctcatgactcatttgcccgttgaatagacgatgacgaaatctataaagatctaatgaaaaaaagccgcgataaagtgtttctcgtgcaataatttctacatcgtttttgccaaatgtaacgggcaggttgtctggcttaagcattgttaatgtcctggcactaatagtgaattaaatgtgaatttcagcgacgtttgactgccgtttgagcagtcatgtgttaaattgaggcacattaacgccctatggcacgtaacgccaaccttttgcggtagcggcttctgctagaatccgcaataattttacagtttgatcgcgctaaatactgcttcaccacaaggaatgcaaatgaagaaattgctccccattcttatcggcctgagcctctctgggttcagttcgttgagccaggccgagaacctgatgcaagtttatcagcaagcacgccttagtaacccggaattgcgtaagtctgccgccgatcgtgatgctgcctttgaaaaaattaatgaagcgcgcagtccattactgccacagctaggtttaggtgcagattacacctatagcaacggctaccgcgacgcgaacggcatcaactctaacgcgaccagtgcgtccctgcagttaactcaatccatttttgatatgtcgaaatggcgtgcgttaacgctgcaggaaaaagcagctgggattcaggacgtcacgtatcagaccgatcaacaaaccttgatcctcaacaccgcgaccgcttatttcaacgtgttgaatgcgattgacgttctttcctatacacaggcgcaaaaagaagcgatctaccgtcaattagatcaaaccacccaacgttttaacgtgggcctggtagcgatcaccgacgtgcagaacgcccgcgcacagtacgataccgtgctggcgaacgaagtgaccgcacgtaataaccttgataacgcggtagagcagctgcgccagatcaccggtaactactatccggaactggcggcgctgaatgtcgaaaactttaaaaccgacaaaccacagccggttaacacgctgctgaaagaagccgaaaaacgcaacctgtccctgttacaggcacgtttgagccaagacctggcgcgcgagcaaattcgccaggcgcaggacggtcacttaccgactctggatttgacggcctctaccggaatttctgacacctcttacagcggttcaaaaacccgtggtgccgctggtacccagtatgacgatagcaatatgggccagaacaaagttggcctgagcttctcgctgccgatttatcagggcggaatggttaactcgcaggtgaaacaggcccagtacaactttgttggtgccagcgagcaactggaaagcgcgcatcgtagcgtcgtgcaaaccgtacgttcctccttcaacaacattaatgcttctattagtagcattaacgcctacaaacaagccgtagtttccgctcaaagctcattagacgcgatggaagcgggttactcggtcggtacgcgtaccattgttgatgtgttggatgcgaccaccacgctgtacaacgccaagcaagagctggcgaatgcgcgttataactacctgattaatcagctgaatattaagtcagccctgggtacgttgaacgagcaggatctgctggcactgaacaatgcgctgagcaaaccggtttccactaatccggaaaacgttgccccgcaaacgccggaacagaatgctattgctgatggttatgcgcctgatagcccggcacccgtcgttcagcaaacatccgcacgcactaccaccagtaacggtcataaccctttccgtaactgatgacgacgacggggcttcggccccgtctgaacgtaaggcaacgtaaagatacgggttatctgccgcattcttcccccttctcgcttcaatttcgaccagccatcctctattctgatgggtatttaccactggtcccggaagacaaaaatgaaacggacaaaatccatacgccacgcatcgttccgcaaaaactggagcgcacgccatctgacaccagtcgctctcgcggttgccactgtttttatgctggctggctgtgaaaagagtgatgaaacagtgtctctctatcaaaatgctgacgactgttcagctgcaaacccaggcaaaagcgccgaatgtaccaccgcgtacaacaatgcgctgaaagaagccgaacgtactgcgccgaaatacgccacccgtgaagactgtgttgctgaatttggtgaaggtcagtgccagcaggcaccagcccaggctggcatggcaccagaaaaccaggcgcaggcccagcaatccagcgggagtttctggatgccgctgatggccggttacatgatggggcgtctgatgggcggcggcgcgggatttgcacagcagccgctgttctcctcgaaaaacccggccagcccggcttacggtaaatataccgacgcgaccggtaaaaactatggcgcagcccagccaggccgaaccatgaccgtaccgaagacggcaatggcaccaaaaccggcgaccactactactgttacccgtggcggttttggtgaatctgttgccaaacaaagcactatgcagcgtagcgcaaccggcacctcttctcgttcaatgggtggctgataccgatggaaagagtcagtattaccgagcgcccggactggcgcgaaaaagcccacgaatacggtttcaattttcacaccatgtacggcgagccgtactggtgtgaagatgcttactacaagttgaccctcgcccaggttgaaaagctggaagaagtcaccgccgaactgcaccagatgtgcctgaaagtggtggaaaaagtgatcgccagcgatgagctgatgaccaaattccgcattccaaaacacacatggagttttgtgcgccagtcatggctgacgcaccagccatcgctttattcgcgtcttgatctggcatgggatggtactggcgaacctaaacttctggaaaataacgccgatacgccaacgtcactatacgaggcggcgttctttcagtggatctggctggaagatcagcttaacgccggtaacttgccggagggcagcgaccagtttaacagtttgcaagaaaagctgatcgatcgcttcgttgagctgcgtgaacagtatggcttccagttgctgcatctcacctgctgtcgcgacacggtggaagatcgcggaaccattcagtatttgcaggactgcgcaacggaagctgaaatcgctaccgagttcctctacatcgacgatatcgggttaggtgaaaaaggtcagttcacggatttacaggatcaggtgatttccaacctgttcaagctgtatccgtgggaatttatgttgcgtgagatgttctccaccaagctggaggatgcaggcgtacgctggctggaaccggcgtggaagagcattatctccaacaaagcgcttctaccgctactgtgggagatgttcccgaatcacccgaacctgctgcccgcttattttgcggaagatgatcatccgcaaatggaaaaatatgtggttaaaccgatcttctcccgtgaaggcgcaaacgtgtcgatcattgagaacggcaaaaccattgaagcagcggaaggtccgtatggcgaagaagggatgattgttcagcaattccacccgttaccgaaattcggcgacagctatatgctgattggtagctggctggtgaacgatcaacctgccggaattggcattcgtgaagaccgtgcattgatcacccaagatatgtctcggttttatccgcatatttttgttgagtaatacagcttaatattgccccgataagcggggcaatctcttataatccaccattcataactcccatcaatatataaacacatacatatccaacctttatttaacattaatactcaatttaatgttaaatcgtcatatgcaagcgatattgtaattaaagtaagtgaatacatcacaacataactatttgatattatttaaatactttacttttatctcaccagatttaaatttaataattaaaaaacaatgttgcagggatcacactacacagtattgaacattgtgattgatatattgcccccctactatccattaaacataaatatttgtttcaccgaataacaacatatttaaaagaaacacaaaaacattctcactctttattgaattaatatttatattcacgtaacgaatttattagcaccctctcaacagtcgatattcatcattattatatatttgcgttatataaggagatatatccatgtttgataaatatagaaaaacactcgtagccggaactgtggcgataaccctgggtttgtcagcatcgggggtgatggctgcgggttttaaaccagcgccacctgccgggcaactgggtgcggtcattgtcgatccctacggcaatgcaccactgaccgctttggttgacttagatagccatgttatttctgacgtcaaagttaccgtccatgggaagggcgaaaaaggcgtagaaatcagctatcccgtgggtcaggaatcactaaaaacttacgatggtgtaccgatttttggtctttatcagaaatttgctaacaaagtgaccgttgagtggaaagaaaacggcaaggtcatgaaagatgattatgtggtgcacacttcggccatcgtcaataattacatggataaccgctctatctccgatttacaacagaccaaagttattaaagtcgcaccgggttttgaagatcgcctctatctggttaatacccacacctttaccgcccaaggttccgatctccactggcatggtgagaaagataaaaatgccggtatccttgatgcgggtccggcaaccggcgcactcccttttgatatcgcgccctttactttcatcgtcgataccgaaggtgaataccgctggtggctggatcaagacactttctacgatggtcgtgaccgcgatatcaacaagcgtggttatctgatgggtatccgcgaaacgccacgcggcacctttaccgctgtacaaggtcagcactggtacgagttcgacatgatggggcaggtgctcgaagatcacaaactaccgcgcggatttgctgacgccactcatgagtccattgagacgccaaatggcacggtactgttgcgcgtaggtaagagtaactatcgtcgcgatgacggcgtacacgtcaccaccattcgtgaccatatcctcgaagtcgataaatctggtcgcgttgtcgatgtatgggatctgaccaagatcctcgatccgaaacgcgatgcactgctcggcgcgctggatgcaggtgcagtttgcgttaacgttgaccttgcccatgcaggacaacaggcaaaactggaaccagatacaccgttcggcgacgcgctgggtgtagggccaggccgcaactgggcgcacgtgaactctatcgcctatgacgcaaaagatgactctatcatcctctcctctcgccaccagggtgttgtgaagattggtcgtgataagcaagtgaaatggatccttgcgccctctaaaggttgggaaaaaccgctggccagcaagctgctgaaaccggtggacgctaacggtaaacctattacctgtaacgaaaatggcctgtgcgaaaactcagacttcgattttacctacacccagcataccgcctggatttccagtaaaggaacgctcaccatttttgataatggcgatgggcgtcatctggaacaacctgccttaccaaccatgaaatactcccgctttgtggaatataagattgatgagaagaaaggcaccgttcagcaagtgtgggaatacggtaaagaacgtggctacgatttctatagcccgattacctccatcattgaatatcaagccgaccgtaacaccatgtttggcttcggtggttctattcatttgttcgatgtcgggcagccaaccgtcggtaagttgaacgaaatcgattacaaaaccaaagaagtgaaagtggaaatcgacgtgctgtcagataaacccaatcagactcactaccgtgcgctgttagtccgtccacaacagatgttcaaataattaagaagggaataaaaatgtcgaaattagggatctcatcactatttaaaaccatactgcttaccgcagctttggctgtttcatttaccgcttctgcatttaccgaaggcacggattacatggttctggaaaaacctattccgaatgccgacaaaacgctgattaaggtatttagctacgcctgcccgttctgttacaagtacgacaaagcggttaccggtccggtatcggaaaaagtgaaagatatcgttgctttcacgccgttccatctggaaacaaaaggtgaatacggcaaacaagcaagcgaagtctttgcggtcttgatcaataaagataaagcagcaggcatttccttatttgatgctaactctcagtttaagaaagccaagtttgcctactacgcggcttatcacgacaaaaaagaacgctggtctgacggtaaagatccggctgcttttatcaaaaccggtctggatgccgcaggtatgagtcaggcggattttgaagcggcactgaaagaaccagcagttcaagaaacactggaaaaatggaaagcctcttatgatgtcgccaaaatccagggggttccagcctatgtcgttaatggtaagtacttgatctacaccaagagcatcaaatccatcgacgcgatggcagaccttatccgtgagttagcaagcaaataacagggaaacaggctatgggtattaagggaatgtggaaagatcttcgcacatcaccagttgacacactggtcagatggcaggagcaacgcttgttgtggttgttaatggccgttgcgatgggcgcgttaattatcctggcgcactctttcttccagatctatctctacatggcaccctgtgagcaatgtgtatacattcgctacgccatgtttgtgatggttattggaggattggttgcagcgatcaacccaaagaacatcatcctaaagctaattggctgcgtgatggcattttacggcagcattttgggactgaagttttcgctcaaactgaacgatatccaccatgcagtacataatccggatcccgattcactgtttggcgtacagggttgctctaccgatccaacttttccctttaacctgccgctggcacagtgggcaccaaattggttcaagcctaccggggattgtggctatgacgcaccaatcgttcctgatggcgtcacactgagcagcacgcaacagtggtttgtggaaatgtatcagcaatctgaaggctggtatctgctaccaccatggcattttatgaatatggctcaggcttgtatgctggcttttggtatgtgtctggtgctgctggtcattatgagtggcgcatgggcgcttaaaatcatcagaggctaactcagcaacacccgaagccagtcattctggcttcgggttcttttattaacctatctgcaccgacagcatacttaaactgcccatttctataccatcgaccggaatggtaattggctcctgcccatcccacgcccctaagacatacaacaacggcagatagtgctctggcgttgggttcgataacgcgccaccttcatggtcgagataattcaccagaggatgttgttccaccggcccttgccacgtcagattcgctttcacatactcattaaacgacgtcgcccacggatacggtgaactatcaccgtgccacttcactgtacgcaggttatgtaccacgttgccactggcgaccaacattatcccttcatcacgcagcgccgcgagtttgcgccccatttcgaaatgccaggcggcaggtttgctactgtcgatactcaactgcaccatcgggatatcggcgtcagggtacatcttaatcagcacgccccaggaaccgtggtcaaagccccaggcttctttatccagcgccacaggaaccggcgctaacagctcaaccagatgctgtgccagcgcaggtgaacccggagcaggataatgcgtatcgtacagcgcctgcgggaagccaccaaagtcatgaatcgtgggcggcatctccatcgcggtcactcctgttccacgggtaaaccaatgagccgaaaccaccactattgcttgcgggcgtggcaatgtcatccccaacgtctgccagctgcgggtatacaaattatcttccagcacgttcatcggactaccgtgacctaaaaacaatgctggcatacgtgttgaagacatgatgatatccttaactaaaggtgtcattttgatatcctcacaatacgcttgttcggcggagtaagaacccggataacaatgatgatgatcatcagttattttgacgatctgcctgaaggtgaagatttataaggagttgtcgatgtcagtacctctcattctgaccatactggcgggggcagccacgtttattggcgcgtttctcggcgttctcgggcaaaaaccctcgaaccgcttactggcgttttcgctaggatttgcggcggggatcatgttgctcatctcattaatggaaatgcttcctgccgcattagccgccgaaggaatgtcgcctgtgttgggttatggaatgtttatcttcggtctgcttggctattttggcctggaccgcatgttgccacatgcgcatccgcaggatttaatgcaaaaatcggtgcagccgttgccaaaatcgatcaagcgcacagccattctgctcactctcggcatcagtctgcataacttcccggaagggattgccacctttgtcacggcgagcagcaacctggagctgggatttggcatcgccctggccgtagcgttgcacaatattcctgaaggtctggcggttgcaggcccggtttacgctgcaacaggatcgaaacgtaccgcgattctgtgggcgggcatttccgggctggcagaaattcttggtggtgtgctggcatggttaatcctcggtagcatgatttctccggtggtcatggcggcaatcatggcggcggttgcaggaattatggtggcgctctccgttgacgaattaatgccgctcgccaaagagatcgaccccaataataaccccagctatggcgtactatgtggaatgtcagtgatgggattcagtttagtgctgctacaaacggcgggaattggttaaagacgataatgacagatgttgcccattgctaaaggcaacatctgtatcgttattaaaggtattattgatgcttttcaaacacttctttatcggagcgtttatctaatttacttcgggcagctaacagcgcatctctgtcatggcgaaaagctttacagtaacgtttaagatgaagaaaatagccaccagccagtagaacaattaatacaatccagtaccaggcaataaacatccttttcaccttcaaaatttaacattactaaacatttagcgttaaaatttcacatatccatcgttgaatacattcatatactcgcataattctggatcaagtatatgatttcgatcatagtaagtgttgtattatataccatatctggttaaaaaaagaacaaccaagactattaatatatattatcccccgataaaacattactaattaataatataaattaataagcatcgctagatatatattatatcttcacgattattaagcccctactcgttataataagtatacactcccccctttacaacattaggcgtaaacctttgtcaacaaacggttgttttttcgccgcaattcatacaaaaaaattatcacaaataacgataaacaacaaatatctagatatatacacctcaatatataacggggaattatattttaagttttacttaatcagcatttaatataaataacgagtcaaattatctctggttatggtaatgtccatagctgaattaatattaaattcaaacctgtattttcctcatccatttataaaggattatagtcatgttaaaaaaaacattgttatctatgttcgcaaccgcattgttatcaggcgttgcttttaacgctcttgctgacgatgctaatcagggttcaggtaaaattacttttaaaggtgaagttatcgatgcaccttgttctattgctcctggtgatgaagatcagacaataaacctcggtgaagttgctgataccgtattaaaaagcggtcagaaatcactgcctgtagatgtcaccattcatttgcaggattgtattttatctgacggcactaacactgttgataaagtcaaaatcacctttagttctgccagtgttgacgctaccgactccaacctgcttaaaaacactctggaaggtaacatcggcggcgcaactgatgtaggcgtacgtctggtgaaatcagacaacaccaacgtgactcttggcactccaatcactatcaacttcccgacgactaactcttaccaggagttgaactttaaagcccgtatggagtctctgggacgcaccgcgaccccgggtaacgtgcaggcacaggctaattacgtactcgactacaagtaatcggtagtcaatacctacacaacgccaggcggtaaagccgatgaaatttcatcggcaactttgggcctttttagaaatggatttttatgaacaataaaaacacgttttcccgggataagttatcccatgcaattaaaaatgccctgtctggcgttgtgtgttccctactcttcgttttgccagtccacgccgtagaattcaacgtcgatatgattgacgcagaagaccgtgagaatatcgacatctctcgttttgagaaaaaaggctatatcccccctggtagatacctcgttcgtgtgcaaataaataaaaatatgttgccacaaacgttaatactggaatgggtaaaagccgataatgaaagtggttcgttactctgcttaaccaaagaaaatttgactaatttcggtcttaatacggaatttattgaatcattgcaaaacatagctggcagcgaatgtctcgatttaagccaacgtcaggagttaacgacacgacttgataaagctacgatgatattatcgctaagtgttccccaggcatggttaaaataccaggcaacaaactggacgccaccagagttttgggataccggtatcaccgggtttatccttgattacaacgtgtacgccagccagtatgccccacatcacggagacagcacccaaaacgtcagctcctatggtacgttaggctttaacctcggcgcatggcgcttacgtagcgattaccaatataatcagaattttgctgatggacgctcggtaaaccgcgacagcgaatttgcgcgaacttatctgtttcgccctatcccctcctggtcgtcaaaattcactatgggccagtacgacctgagctccaatctttacgataccttccactttactggcgcatcgctggaaagtgatgaaagcatgctgccgccagatttacagggttatgcgccacaaattaccggcatcgcgcagaccaacgcgaaagtaactgtggcacaaaatggtcgtgtactttatcaaaccactgtcgcgccaggcccttttactatttctgatttggggcaatcgtttcaggggcagctggatgtcacagtggaagaagaagatggccgcaccagcaccttccaggttggctccgcatccattccctatttaacccgtaaagggcaagtgcgctataaaacgtcactgggaaaaccgacatccgtcgggcataacgatatcaataatccctttttctggacggcggaagcctcctggggctggctgaacaatgtgtcgttgtatggtggtggcatgttcaccgctgatgattatcaggctatcactaccggtattggctttaaccttaaccaattcggttcgctttcttttgatgtcactggagcagacgcgtctttacagcaacaaaatagcggcaatctgcgtggttacagctatcgcttcaactatgcaaagcatttcgaatcgacaggcagtcagattaccttcgcgggttatcgcttctcagataaagattacgtgtcgatgagtgagtacctcagctcgcgtaatggcgatgagtcaatcgataatgaaaaagagagttatgtcatttccttgaaccagtactttgaaacgctggaattaaactcttatctcaacgttacacgcaatacttattgggacagcgccagcaataccaactactccgtatctgtaagcaaaaactttgatattggcgatttcaaaggtatatctgcatcgctggcagtaagtcgaatccgctgggatgacgacgaagagaatcaatattacttctctttctctctacctttacaacaaaaccgcaacatctcctacagtatgcagcgaacgggaagcagtaatacttcgcagatgatttcctggtacgattcatcagatcgcaacaatatctggaatatttcagcgtcggcaacggacgacaatatacgtgatggcgaaccaacactgcgcggcagctaccagcactattcgccgtggggacgcctgaacattaatggcagtgtacagccgaatcagtacaattctgttaccgcaggctggtacggttcacttaccgctacacgtcatggtgtcgcccttcacgattatagctatggcgataacgcccgcatgatggtcgataccgatggcatctccggcattgaaatcaactctaaccgtaccgttaccaacgggctgggcatcgccgtgataccttcgttatcgaactacaccacctccatgttgcgggtgaacaataacgatctgccagaaggtgtcgatgtcgaaaactcggttattcgtactacgctcacccagggtgccatcggctacgcaaaactgaatgccaccaccggataccaaatcgtcggcgttattcgtcaggaaaatggccgcttccctccactaggtgtgaatgtcacggataaagcgacaggtaaagatgtgggcctggtagcggaagatggcttcgtttatctcagcggtattcaggaaaacagtattctgcatttaacctggggtgataatacctgtgaagtcacgccgccaaaccaaagtaacattagtgaaagcgcgataattttaccttgtaaaacagtcaaataattcaggatgaatataatgaaattaccattaatcacaacaggaatgatttgttttctggggatctgcaactttgcccaggcgactgtctcccccgacaggacacgcatcatttttaatgcttcgaataaaagcgcaacggttcgcctgaccaaccaaagtaaaatcgatccttatcttgctcaatcgtggattgaagatgccagcggtaaaaaaacgcgtgattatatttcaacactgccgccgatggaacgtattgagcctgatgaacaggtacaaattcgcctgatggcgctggcctcgttaaataacttaccacaggaccgagaaacgctattctactataacgtgcgggaaattccgccgcgtgccaaagaacagaatgtcatgcaaatcgccatgcaaagccgtctgaaactgttctggcgaccgaaagcgattgagttaaaagaaggagagatggttcctctgcaaaaagtgacgattacccgcaccgccgccgggctgaccctgaataacccgacgccttatcatattaccgtcggctatatcggcactaatggcaagacactgatgcctggtgcggacagtattatggtggcaccatttgcttctgcgactcaacacttaaacaacctgccctctacgttccagttaggctttgtggcggactacggcgggctggagatgtttaaagtagtatgtaattccgtccagtccctctgccaaagtactcctgcgaagaaggggaaaatatgattacactttttcgactactggcgattctttgccttttttttaacgtttcagcttttgctgttgattgctatcaggatgggtacagaggaacaaccctcataaatggagatttaccaacgttcaaaattccagagaatgcgcaacctgggcaaaaaatttgggagagcggagatattaatatcacagtttattgtgacaatgcaccaggatggtcaagtaataacccatcagaaaatgtctatgcctggatcaaattgccccaaataaatagtgccgatatgttgaataatccgtatttaacatttggcgtgacttataatggtgtagattatgaagggacaaatgaaaaaattgatactcatgcgtgcctggataaatatgaacaatactataatgggtattatcatgaccctgtatgcaatggcagcactcttcaaaaaaatgtaacatttaacgcccattttcgcgtctatgtaaaattcaaaagccgcccggcaggagatcagacggtaaactttggcacagtcaacgtgctgcaattcgacggtgaaggcggggcgaacatggcccccaacgcgaaaaatttacgctatgcgattacggggttagataatatttcattccttgactgtagtgtcgacgtccgcatttccccggaaagtcagatagtcaattttgggcagatcgctgcgaattccattgcaactttcccaccgaaggcagcattcagcgtttctaccataaaagacattgcgtctgattgtaccgaacagtttgatgttgcaaccagtttctttacttcagatacattatatgacaatacgcatctggaaataggtaacggcttgctcatgcgaattactgatcaaaaaacgcaagaagatattaaatttaaccagttcaaattatttagtacttatattcccggtcagagtgcggcaatggcaacccgcgattaccaggccgaattaacccaaaaacctggtgaaccactcgtctatggcccatttcagaaagacctgatagttaaaatcaactaccactaaacagcaaaatgccgggaacaccccggcattttcatatttagtatttcatctcattagctggctttacgctcatgtgcctgacggtatgccaccaggtcttcaatagtcacgagcgccatattgtgtttattggcaaactcaatgcactctggtgcacgcgccatcgtgccatcgtcattagtcagctcacacagcacaccagctggtttaaagcctgccagcgtcatcagatcgatagtcgcttcagtatgaccgccacgcgtcagtacaccacctgcctgcgcacgaagtgggaaaacgtggcccggacgattcagatctgacggttttgcgccatcggcaatcgctgcgcgaacggtcgtaatacggtcagcggcagaaacaccggtagtcacaccttcagctgcttcaatggtcacggtaaaaccggtgccataggcgctggtgttattttctaccatcattggcagatcgagttgtttacggcgatcgtcagtaatgcacaggcaaacaataccactcccgtggcgaatggtcagcgccatctgctcaacggtcatggtttctgccgggaagatcatatcgccttcgttttcacggtcttcatcatcaagcaccatcacaccgcgtccttcacgcagcgcagccagtgcattttcaacacgttcgaaaggcgtaccaaaagaggaaagtagcgtctgattcatggtaaaaaaacctcactaaaattatggttaccagaatcagggcagtcttaggagtggcggcatatagccaaaataacgtgagcgggtccatgcccgacagaatcgttactctctcccatccggactctaaccgtcggccccggaattacaccggatctgctgtcctttgagttcgcacccaaagcgctcgcgggctttcaactgagttgatttaccgccggtggggaatttcgccccgccctgagaataagcggattcactataacgctaatgattagcggcagcaacgcatagcttcacataattctggtttatgacttacccttatcgcactacaatggcactcaacacctatcagtacagggaaactacaatgattgacccgaaaaaaattgagcaaatcgctcgccaggttcacgaatcaatgcctaaaggaatcagggagttcggggaagatgtggagaaaaaaatccgccaaaccctacaagcgcagctgacgcgtctcgatctggtgagccgcgaagaattcgacgtacagacgcaagtcctgttacggactcgtgaaaaactggcgttactggagcagcgcatcagcgaactggaagcgcgctataatccggtagcagaacttcaatctcctccggctatcccgccagttgataaagcagaataaagcaccacaaaaacgggccagacggcccgtaatatcagtgttctaattcaagttctctggtttgcatcatctgttggcaataccaggcataacgtgcgcaaaaccaggttctatgttcttcatccatgttaccagtaacggccagaatatcgaccgggcgaccttctgcgtgcattctggcaaaactacgcgcgagaaaatcgaaattatttaaagaattaagactatgatccataagcacatcctccggttattgcataccttttaaggccatatgctttttctgatttcagtattccccaatcagtgtagtgcctttaaacataacgtgcgtaaatatattgtccccgatcacactttttagtgaaaaataaaaaaaccatattaaaagactttctcttccagaacctctctaacatgtgttattattaacaaagataaatgtaagcaaggaaactattccaaagtaaatattgcgtcactaaatggacattggagtgacatatgattttattcgccgactataacaccccttatcttttcgctatttcctttgtactgttgatcggccttttagaaatttttgcacttatctgcggtcacatgctctccggtgctcttgatgcacatcttgaccattatgattccataaccacaggtcatattagccaggcacttcattatctcaatattggaagattaccagctctcgtcgtcctctgcttactcgctggtttttttggtcttattggcatcctgttgcaacatgcctgcgttacgctctggcaatcaccactccccaacctgttcgtggttcctgtcagtttactgtttacaattattgcagtgcattataccggtaaagtcgttgcaccctggattccacgcgaccatagttcagctattacagaagaagaatatgttggtagcatggcattaattaccggccatcaagccacttcaggtaacccctgcgaaggaaaactcaccgatcaatttggccaaatacattatttgttactggagcctgaagaaggaaaaactttcactaaaggagacaaagtgttaattatttgccgactttctgcaacgcgatatttggcggaaaacaatccctggtcccagatattgtgatttattaatcaaaaggaaatttaataatggatgatatcgttaattctgtgccctcctggatgtttaccgcgattatcgccgtatgcattctgtttattattggaattattttcgccaggctctatcgtcgcgcttcggcagagcaagcatttgttcgtactggtttaagtgggcaaaaagtggtgatgagcggtggcgcaatcgtgatgccgatctttcatgaaataattcccatcaatatgaataccctgaagctggaagtcagccgttctactattgatagcctgattacgaaagatcgtatgcgtgttgatgttgtagtggctttctttgtacgggtaaaaccgtcagtagaaggcatcgccactgcggcccagacgctggggcaacgcactctatcaccagaagatttacgtatgctggtcgaggataaattcgtcgatgccctccgtgcaacagcggcacaaatgaccatgcatgagttacaggatacccgcgagaacttcgtgcagggagtacaaaataccgtagctgaagatctgtcgaaaaatggcctggaactggaaagcgtttcacttaccaactttaaccagacctcgaaagaacatttcaatccgaacaatgcctttgacgccgaaggtttaaccaaactgactcaggagacggagcgccgtcgtcgcgaacgtaacgaagttgaacaggatgtggaagtcgcagtgcgtgagaaaaaccgtgatgcactttcgcgcaagttggagattgaacaacaagaagcgtttatgacgcttgagcaggagcagcaggttaaaacccgtaccgctgagcagaatgcgaaaattgcggcttttgaagctgaacgtcgtcgtgaagcagagcagacgcgaattctggctgaacgacagattcaggaaacagaaatcgaccgcgaacaggccgtccgctcaagaaaggttgaggccgaacgtgaagttcgcattaaagagatcgaacagcagcaggtcaccgaaatcgctaaccagacgaaatcgatcgctattgccgccaaatcggaacaacagtcccaggcagaagcgcgtgctaaccttgcactcgcagaagcagtaagcgcccaacaaaacgtagaaaccactcgccagactgccgaagccgatcgtgctaaacaagtggcgttgatcgccgcagcgcaggatgcagaaaccaaagcggttgaactgaccgtgcgggcgaaagcagaaaaagaagccgcagaaatgcaggcggcggctatcgttgagttagccgaagctacacgtaaaaagggtctggcggaagcagaagcacaacgtgcgctgaacgatgctatcaacgtactttctgatgaacaaaccagccttaaattcaaactggcattattgcaggcgctgcctgcggtaattgagaaatccgttgagcctatgaaggctatcgacggcatcaaaattattcaggtcgatgggctgaatcgtggtggcgctacgggtgatgcaaacacggggaatgtggggggcggaaacctggcagaacaagcgttatcagccgcactctcttaccgcacacaggcaccgctgattgactccttgctcaatgaaattggcgtttcaggcggctcactggcggcattgacttcatccttaagctcaacaactcccgtcgaagaaaaagcagagtaaaccctcttctatgaataatccctggcccaaaaagccggggattttttatatctgcgttccgctaaaaggtgcaaatgatcaggctgttgcagcattttgcgtgactgctcggggaaggcaaaactgcctctgggaaagcgttgcgcggagtccggcgctcatcaacaatcggggagccagcaaggggctgaaacgggaaagcccctcccgaggaaggggccttatagaaggaaagggttatgatgaagttcgtcatcatactggttgtgttgttactgttaagtttcccgacttactaacaactcatcagaggggggagaaatcctcccttacccttgttcctttactttaggttgaaaaaacaacagcgtcaatagacctgcctgctacgaagcgagatctgtgaaccgctttccagttagccttttttatccagttggatcttcttgatgatgttggtcgtcgagcaaccgtcttcaaagttgagcaccagcacttcgccaccgttggcccagacttctttactcccggcaatctcttctggtttatagtcgccgcctttcaccagcagatctggcaagatcccggcgatcaagcgctgcggcgtgtcctcttcaaacgacaccacccagtcgaccgcttccagtgcgcccagcacaatcatacgctgttcgagcgggttaacggggcgggaatcccctttcagccgtttggtggaggcatcgctgttcacagcgacaatcaaacggtcacccagtttacgggcatttgccagataagagacgtgcccggcgtgcaggatgtcaaagacaccgttggtcatcaccactttttcaccgcgtttacgcgctgccgctacagcaagcttcagttcctcttcggtcatcacaccaaagccggtatctgcacgtccacgtactgcgttttccagctcgatcggcgaaaccgtggatgtccccagtttgccgaccaccacaccagccgccgcattggcaaagaagcaggcttcttccagcgaattacccgctgccagcgttgccgccaggacgccaatcaccgtgtcgcccgcaccggtaacgtcatacacttcctgcgcctgggttggcatatgcagcggcgctttacccggttgcagcagcgacataccctgttcggaacgggtcactaacagagccgagagttcgtaatcggcaatcagtttcatgccgcgctcaacaatctcttcttcggtcttacatttaccgacaacagcttcaaattccgagagattcggcgttaacagcgtagcgccgcggtagcgctcaaaatcggtaccttttggatcaatcagcactggaacacccgctttacgcgccagttggatcatctgctgtacgcttgccagcgcacctttggcgtagtcagaaagcaccagcgcgccaatcgaactcagtgcctgattaatccgctcgtgcagcggctgcggatcaaccccttcgaaaccttcttcgaaatccagacggatcagttgttggttgcgggaaagtacccgtaatttggtgatggtcggatgcgtcggtacagaaacaaagtcgcatttgacgttgacgtcggccagagatttactgagcgcgcgcgccgcatcgtcaatgcccgtcaacccgaccaggcgtgcattagcaccgagagaagcgatattcatcgccacgttagccgcgccgcccggacgttcttcgatggtattcactttaaccacgggcaccggcgcttccggcgagatacgactggtgggaccgtaccagtaacgatccagcatcacatcaccaaccaccatcactcctgcacgttcaaactctggcagcgttactttcattcctgtctcctgagagattcaaaatttgcgcgcgataataccatacttcattcttccaccagccacttctgccagcttgcccgcaccagttcacgctctgcggtgaagcaatcctccgacacatggcccggcaattcctgtaatgccagatgatgaagttcatcgcgcagcgtcgtgtaagcacgggtcagcgccatcgcttcctgctcttccataatgtcgttttgcgccagtagttccagaatgcgcacgttgtctgaccagcgcgttaacttcggtttttcgtgagcgtagcgcaacaccagatattgagtaataaattcgatatcggtaattccgccttcatcggctttgatatcaaagcgatcgcgatgtttattgccgagatgggcacgcattttctcgcgcatttcccgcacttctgtttgcagggttttgccttcgcgcggcagcgtcataatctcccggcgtactgcgtcaaagtgcgcggtgagctgcggatcgccgtacactacacgcgcacgcaccagcgcctgatgctcccacgtccaggcctcgtttttctgataatcagcaaatgcttctgcggatgtcaccagcattcccgccgccccggacggacgcagtcgtgcatccacttcatacaaaatgccggaagaggttcgcgtactgaacagatgcataatgcgttgcgccagacgcagataaaactgtcgcccgtcgatttcccgctcgccgtcagtcatcgcatccattgggcaatcatggaggaagatcaggtcaagatcggaactgtagcctaactcccagccacccagcttgccgtagccgaccaccgcaaaaccacgcccttcgcgttcgttcaggtgatttggcttaccgtagcgggcaaccatttgaacccacgcctgctgaacgacggcatcaatcatggcttctgccagccaggttaagtgatcgctcactttcattaccggtagcgtaccggcgatatccgctgccgcaatgcgtaacagctgcgcctgtttgaactgacgcagcgcctcaagctgttgttcttcgtcatcttccggcacgcgcagcaaatactggcgcagttcatcacggtaggcatccgtcgccgttggttggtagagggtatttggatcgagcaattcatccagcaataatggataacgcgctagctggctggcaatcatcggcgatgcagcacacagagaaatcaaatgattaagcgccgcagggaattcactaagcagctcaagataagtggtgcgagtaacaatccccaccagcaaggcggtaatgcgcgacagcgtgacagcagcgtcttcacgcgcacagacatcacttagcagatgtggcatcagatggtcgagcacctgacgtcctcgcggcccgatagtgcgcttatccagctctttgcggaaatcagcaatcagcattagcacctgtttgcgatcatcctcgctaagatgcgccagcactggcgtggtgtcatcttcctgcaacgcatcctgccacagctcacgccactgttccgacagcgactcttcctgagtttcactttcgtcgtcgccaatcaattcattaaacacccggcgcacattggccatatgtgcggtcagcaccccggtcaattgcggccagtcagcaaagtccatcgcccacgccagccgcgcacggttaagctcatcagaaggaagcgtctgggtttgttcgtcgttaatgctttgcagcaggttttccagacgccgcaggaacagatacgccactcgcaattgttcagcatcgttttcagaaagcagatgcagcgcggcaatggcgctgagcgttggcagtaaagcgcgcgattgcagcgacggttcgcgcccgccgcgaatgagctggaacacctggacgataaattcaatttcgcgaatgccgcctgcgccaagtttgatgttgtcggtcaaaccgcgtcgacgcacttcacgggcaatcattcctttcatgttgcgcagcgactgaatcacgctgaaatcgatgtaacgacggaaaacaaacggacgcagcatcgcacgcaactcgttagcatagacgccgtcgctatcccccataatccgcgccttgaccatcgcgtaacgctcccagtcgcgcccctgctcctggtaataatcttccagcgccgcaaaactcagcaccagcgggccactttcaccaaacggacgcagccgcatatccacgcgatagacgaagccatcctgcgttggttgatccagcactttaatcagccgctgccccatgcgggtaaaaaactgcgcgttatccagttcccggcgtccaccctgggtacaaccatgttccggccaggcaaaaatcagatcgatatcagaggagaaattcagttccccgccgcccagcttacccatgcctaaaatcagcagcggttgcgcttcgccctgcgcattgcacggcgttccccattcgcggcagcaggcgtcatacagccagtcacgcgccgcaacaatcagcgtctccgccagatggctgagctgctgcaatatgctctcttcagtaaccagagccagcgtttgcgcccaggcgatgcgcaccataatgcgccgccggaatagccgcagctcgcgcattaacccggcttcgtcactcacattactgagcgcctcctgcagccatgcagcgtaatgctgccattcgtcggcctgcggcggttggctttccagttccgtcagccactctggatgcgcaatcacgctgtcctgcacaaaatcactgaaagtaagtactgacttcgcctgtgcgctaagtgattcctcggctaaaggctctggcagccgctcaacaacggtctgccagtactgctgtaacggtgaagagagcggcttcataagcgattttatccttgcctgattaacgttttccgctgtgcaaccagaacggttcctgattgtttgcctcattacggaaatgttcaatttcaatgcgttgcccggtcgcaatagcgtgacgcagcccctgccagttctccagccagtcttgcgcgacgacaggatcgtagtaacccgccagcaacagtattgagtcaatatcacgcgtcaggcgtggcaattggtcacggtagcgatcgcctaacggctggcagaaaacgcttttcagttcagcggcatggcgggaaagatggatatcggcaaagcgtttgaaggaatcgctgattttgctctgcgctttggcatctaaaaacggctgccaggctttgcttaccagccattcggtcaacgccagcttcgccattgccgtttcggtagagtagaccgccgttacggcagaaaccgcagaagcaatggtcgcctcgcattgagtcagcagatcacgtaagtgagtgctcgctttacgcggcacgataccgccgaacagcatcagtgtatgacggaccaggccaatggctgccagcacctgctctttcgccgcatcgttgccgcgtacccacagttcttcatgatactgccattgcgctaacgccagctcgagcgccgcttccagcccctgttccacatcagcttttgccgcaacatgcaaaatggtggtcggtttgatttcacgcgccggattgccctgcgccagatgatagccacgcgctgctttgctcaggctgccctggcgtaatccggtttgcgataccagttggttcgccagtttcagcaccgcacgcatgtcgccgctaagcagttccagttccagctcacagataggttcagcaaattcacccgctttcacctcaccctgatcgaaagcgatttcaattcggctgccatcgacctctactagccatttttcgcgataaaaatcggtgctaaacagcggctgtacgcgggaagcgagatcggcaggcaattcgccgttcggccagacttccgtcggtaactgcgccaggtcgagcgtcggttcgctcaacgccacgttatattccgggcgctggtgtaagccgcctgtcactcttcctgcaactttcatggtcatctcatagcgaccgttttcgccacgaatacgcaagcccatgtcgtgcccacgcagccagttatccggcgtttcgtagtaaatattcagcaactgcacgggatcatggtgctcgccgcccagcgtattgagatggtcacgcaacgcctcaacggcactgtgattaacaataaactttaattcgatttcctgagccatccttcctccactgggtactccccccaacgtaggcgggaggggaatttgggctgttaagcccgcagtttatcagccacgctgattctgaatatactttttcacaacttccagcggtgctccaccacatgaaccgatgaaataagagcgtgaccagagtacgggctttgaatacgcggcgcgcaaatcaataaaatcattccgcagccgcctactggtaacggacttaaggctgtttaccagctttgtgagttgcaccaacggtgggtattcaatcagcatgtgaacatggtctgcctcgccgtcacattcctttaactcggcgccaaagtccgcgcatacctccgctacatactgacgcatgtttgcatgatgcaattcaccaaaaactggacggcggtattttgtcataaaaacaacgtgaacatgcaacaggtaagctgaatagcgtgaacgattgatttcgcacacgtattgaccctcccaaaaaaatgtggatatattgtacattctaaacaaccacatactgaatgcaaaatgttaatccagaaagcatataaatacaggctctaccccactgaccagcaggcgcaaaggttgcgtcagttgtgcggttgcgctcgctttgtctggaactatgcactgaatgaaacactgagcattcatgacgcgggcggaaaaattccgtcagctttcgacctgaataaacgacttacgggctggaaaaaactccctgagctggcctttctttctgagggttacactgacaacctccagcagaaactgaaagacctgcggagcgcatgggatcgctgttttgataaatccctgacggctgaaaagcccgttttcaaaaagaaaaccaaaggctgcgactctatccggttcgtcaatttcagcaaatattgtgggctggattatggccgtgtgaaactcccgtcaggactgggctgggttaaatttcgtcagtcccggaagattgaaggcgtcattaaaaattgcaccatcagccagcatgccggacactggtatgtgtcttttcaggtcgaattagctgttaccgatccgattcacgcatcgaccagcgcaataggcctggatgcaggtataacgaagctggcaacactttcagacggcacggtctttgaaccggtaaacagcttaaaaaaaaatcaggataagctggctcgcttacagcgccgtctggcccggatggttaaattctccgccaactggaaaaagcagaaagcgaagatttcccgtttccactctcatatcgcaaacatccgccgcgattaccttcataaaaccacgacgacgatcagcaaaaaccacgcgatgatagtcattgaggatttaaaggtttcgaacatgtcaaaatcagcagcgggtacggtagaccagccggggcgcaacgtcgcggcaaaatcaggtcttaaccgggcgatactggatcagggctgggcagaaatgcgccgccagctcgaatataagcaggcatggcgcggcggtgatgtactggcgattaatccggcgtacaccagtcagaaatgcgcatgttgtgggcatacatcgaaaaataaccgcaggacgcaggcgagctttatctgtaccgcgtgcggctatacggcaaacgccgatgtaaacggcgctcgcaatatattaacagcaggttttgaagtcatggcggcaggacaaatattgccgtcagtccgtaaaggacgcgcccgtaaggcggcgtaagccgtcgagcgaggaaccggggaatgcggcaacgtattgctaccctgacaagggaatccccctcctgagtcgctttgcgcgaaggtgggggaggatgtcaaggcctttacttatcggttatgtcacataagtgacgatgaacggcgaacttaatgcgatcttttttgtcagtagatagtattttgcgccaaattgccatgcaacgggcaatttgacgggcgtaaaagtttgaagcagtggcaagacctgacacagaggattccgattgatgtcgaatgctttgcgtagcgacactgatgccactactatcgttccactttccatgacaataacgacagcctgatgccaaaattacgcctgatcggattaactttactcgcacttagcgcgactgccgtctcacacgctgaagaaacgcgctatgtttctgacgaactgaatacctgggtccgtagcggtccgggagatcattatcgcctcgtgggcacggttaacgccggcgaggaagtgaccttattacaaactgacgccaacaccaattatgcccaggtgaaagacagctctggtcgtactgcctggatcccgttgaaacaacttagcacggagccaagcctgcgttcccgtgtgccagatctggaaaatcaggtcaaaacgctgaccgataaactcaccaatatcgataacacctggaatcagcgcaccgcagaaatgcagcaaaaagtggcgcagagtgacagcgtgatcaacgggttaaaagaagaaaatcagaaactgaaaaacgagctgattgtcgcgcagaaaaaggtcgatgccgccagcgtacagctggatgacaaacagcgcaccatcatcatgcagtggtttatgtatggcggtggcgtgctggggcttggcttgctgctcggtctggtactgccgcacctgatcccaagccgcaaacgcaaagatcgctggatgaactaaatcgccttcttcgttgcactgtcttattattaggaattgtgtatttgacgaagggatgatggcgtgaagatttatctggtcggtggtgctgttcgggatgcattgttagggctaccggtcaaagacagagattgggtggtggtcggcagtacgccacaggagatgctcgacgcgggctaccagcaggtaggccgcgattttcctgtgtttctgcatccgcaaacgcatgaagagtatgcgctggcacgtaccgaacggaaatccggttccggttacaccggttttacctgctatgccgcaccggatgtcacgctggaagatgatcttaagcgtcgcgatctgaccattaatgcgctggcccaggacgataacggcgagattatcgacccgtacaacggtctgggcgatctgcaaaatcgtctgttgcgccatgtttcccccgcttttggcgaagatccgttacgcgtgttgcgcgtagcgcgttttgctgcgcgttatgcccacctcagtttccgtattgccgatgaaactctggcgctgatgcgcgagatgacccatgcgggtgaactggaacacctgacgcctgaacgggtatggaaagagacggaaaacgccctcaccacccgcaatccccaggtgttcttccaggtactgcgcgattgcggcgcactgcgcgttttattcccggaaattgacgccctgtttggcgttccggcccctgccaggtggcatccggaaatcgacacgggtattcataccttaatgacgctctcaatggcggcgatgctgagtccgcaggtcgatgtccgtttcgcaacgttatgccacgatctcggtaaaggactgacgccgccagaactttggccacgtcatcatggtcatggcccggcgggtgtgaagttagtggaacaactatgccagcgtctgcgcgtgccaaatgaaattctcgatttagccagactggtggctgagtttcacgatctcatccacacctttccaatgctgaacccgaaaaccattgttaaattgtttgattccattgacgcctggcgtaaaccacagcgtgtcgagcaactggcgctgaccagcgaggctgacgtgcgcggcagaaccggttttgaatcagcggactacccgcaaggccgctggttgcgcgaagcctgggaagtggcgcagtcagtgccgacaaaagctgtcgttgaagcaggatttaaaggtgtggagattcgtgaggagctgacccgacggcggattgcggcggtagccagctggaaggaacaacgttgcccaaagcctgattaactttttaaattcagtatattgcagaaatcccttaggtcggataagacgcacaagcgtcatatccgacactatatctcaatcaaaagaacacaacgtacaccgcagccgccacaataaagcgataaatggcgaacgggataaacgaaatgcgcttaatcaattgcaggaaggttttaatcgctatcagcgccaccacaaaagcggtgataaacccaacggcaaacatcgggatatcgccggtagtcaggaagccccagcttttgtagagatcgagcgccgttgcgcccatcatcatcggcaccgccagcaggaacgagaactcggaagcagcgtaacggctcacccccatcagcatcccacctgaaatggtcgccccggaacgggagaaacccggccacagcgccagacactggaaacagccaatcataaacgcctgacgataggtcatatcatcaagacccggcgcacgcggctctttcggcttcaggcattcggcggcaatcagcaacagaccgccaacgaccagtgcatacatgacatttatcgggttaaacaatgatttaatcgtgtcgtggaacaacagccccagtaccaccgccggaatcatccccagcaagatgtggatcagcgttaaacgacctttgctttctccttcgtgctgcaacgggcgaccaaagtggatgccaatcaggccaaacagacgccgccagaacatcactactaccgccagaattgatcctaactggatcacgacttcaaaggttttcgccgtgtcgccctcaaaccccaacaagtgaccgacaataatcatatggcccgtgctggataccggcagaaattctgtcaatccttcgaccacacccaatattgccgctatcagcagcgagtgcatatcgctcatcaataaacccctaaattataaaaatgtaacgcttgtccgaactactgcagtatgaccaggttataatcgtttggtttaacagctgtaaaattaattattttctttcagattattgccacgctcaatgattacgccaacattcgccgcccgcgccactgcgcctggcttgctgagtttgatacgcacccacggcgagttgaagcgtgctaacagcagctccgccacctcttcagccacgcgttccaccagcgcaaaacgcgccccctcgacgtggctgaccaccgtttctgcaatgtcagcgtaactgaggcaatccgccacatcatcacttttcgccgctttacggttatcccacgccatttcgatatcgaacactaacttctgttcgatggtctgttcccagtcgtaaacaccaatagtggtgattaccgaaagttgctctataaatacaatatccatcacgtcctgcctgctttttggctaaccggataccacttccggcgaaatgtgcgtattatccacagattcatcgttgaacacgaattttcaaaacggaacagcttatgagtgcaatcgcgcctggaatgatcctcatcgcgtacctctgcggctccatttccagtgccattctggtttgccgcttgtgtgggttgcccgatccgcgaaccagcggctccggcaatccaggcgcaaccaatgtgttacgtatcggtggcaagggagcagccgtagcagtactgattttcgacgttctgaaaggaatgttgcccgtctggggcgcgtatgaattaggtgtcagccccttctggctaggcttaattgccatcgccgcctgtcttggacacatctggcccgttttcttcggttttaaaggaggaaaaggcgttgctaccgcttttggtgccatcgcaccaattggctgggatctcactggagtaatggcgggaacctggttactgaccgtgctattgagtggttactcgtcgctgggagcgattgtcagtgcactgattgctccgttttatgtctggtggtttaagccacaattcaccttcccggtttcgatgctctcttgcctgatcctgctgcgtcatcatgacaacatccagcgtctgtggcgtcgtcaggagacaaaaatctggacgaaattcaaaagaaagcgcgaaaaggatcccgagtgatttctggtggatctacatgacctgatagccttcgtcgggcttgcccagccgttgctggcaccatgccgccagaaattccacacagacacgtaatttcatgctgcgatagagcggctcccggtaaacagcccagatattggcgctttgtgcatactccggcaatactcgcaccagtttgccactctccagaaacggcaacacatcccactcggaacgcagcataatccctttgccctccagcgcccattgcagcacaatctcgccgctattggaggaaagatgtccgcttaccttcaccgattttttctcctgaccgttccccaactcccatattccgtgggtcatatcgcgctctttggtcaccaggcagtcatgacgacttaattcctgtaaggattgtggctgcggatatttttgcagatactcaggtgctgcgcataatattcttttattttttgtcaaaagatgcgcaatataataatcaggaattgcgtcattaatacgaatatccagatcaatattatcctgcactaaatcaatttgtcgatcgaacaattcaaaatgcacctgtaactcaggataattgcgcatcagttcggtaatagctggcgcaatatggctgcgcccaaaaccaaaactgcaaccaatgcggatcatcccctccgggcgcgttttgatttgcgtgacgtcatcgaccagtcgctgatattgggtgaggatttccagcgcatgttcgtaacaacgctggccactttcagtcagcgccacgccgcgagcggagcggttcagcagagttgttgccagcgtattttcaaggatttggatccgcttggtgacaaatgcaggcgtttgcccaagcgtcgccgctgcagcactaaaactcccgctatggacgatttccaccagtacctgcaagtctttggctaaaggccagctatttagcattgttaaatatccgcagttttgataaacgcagtgtatttcgcaaaacattaccattccctgctctggcgcaatattcgttcttattttcgcgttgattcacgaactgttaattacatattcacggtggcaaaaaatataaaaccacatttttagtggtagtttgtggcggtgaatttttccagacaaatacataaactggagttgccatgatgagcgaaagtaataagcaacaggcagtgaataagttgacggagattgtcgctaactttaccgccatgatttctacccgaatgcctgatgacgtggtggataaactaaaacagctaaaggatgccgaaacatcgtcgatgggaaaaatcatctaccacacgatgttcgataacatgcaaaaagcgatcgacctgaatcgtcctgcctgtcaggacaccggcgaaatcatgttttttgttaaggtcggttcccgtttcccactgcttggcgagctgcaaagcatactcaaacaagccgtggaagaggcaaccgtcaaagcgccactgcgtcacaatgcggtagaaatttttgacgaagtaaacaccggcaaaaataccggcagtggcgtaccgtgggtcacctgggatatcgtccccgacggtgacgatgcggaaatcgaagtttacatggcaggcggcggctgcacgctacctggccgatcgaaagtgttaatgccgtcagaaggctacgaaggcgtagtgaaattcgtcttcgaaaatatctccaccctcgccgtaaacgcctgtccgccggtacttgtgggcgttggcatcgctacctcggtggaaaccgccgcagtgctctcgcgtaaagccattttgcgcccgattggcagccgccatcccaatccaaaagcggcagagctggagctacgcctggaagaaggactcaaccgtctggggattggtccacaagggctgactggcaacagttcagtgatgggcgtgcatatcgaatctgccgctcgccatccgtcaaccatcggcgttgctgtttctaccggctgctgggcgcatcgtcgcggcacactgcgagttcatgccgatctcacctttgaaaatctgtctcatacccggagcgcgttatgaaaaagatcctgacaaccccgatcaaagctgaagatctgcaagatattcgcgtcggcgatgtgatctacctgaccggtacgctggtgacctgccgtgacgtttgtcaccgccgattgatcgaactgaaacgtccgatcccttacgatctcaacggcaaagcgattttccacgctggccccatcgtgcgcaaaaacggcgacaaatgggagatggtgtccgtcggcccgacaaccagtatgcgtatggaaagttttgaacgtgaatttatcgagcagaccggcgtgaaactggtggtcggcaaaggcggaatggggccgctgaccgaagaaggctgccagaaattcaaggcgctgcatgtgattttcccggctggctgtgcggtactggcggcaactcaagtggaagagattgaagaggtacactggacagaactcgggatgccagagtcgctgtgggtctgccgggtcaaagagtttggcccgctgattgtctctatagatacccacggcaacaacctgatagccgaaaacaaaaagctgttcgccgaacgccgcgatcccatcgtagaagagatctgcgagcacgtccactacatcaaataaccctcccagagaggctcgcccctctcctttttctcaggcataacacgatgaaaccttccactgaatggtggcgataccttgcgccgctggcggtcatcgccattattgctctacttccgcttcccgcagggctggagagtcatacctggctctactttgccgtttttactggcgtgatcgttggactgatcctcgaacccgtgccgggtgccgtggtggcgatggtgggtatatccatcatcgccattctttcgccgtggctgctgtttagcccggagcagctcgcccagccaggttttaagttcaccgccaaatccctctcctgggcggtttctggtttttctaattcagttatctggcttattttcgccgcctttatgtttggtacgggctatgaaaaaaccgggcttggacgtcgcatcgctctgattctggtgaaaaaaatggggcatcgcacgctgtttctcggctatgcagtgatgttctccgagctgatactcgcgcctgtaacaccgtccaactcggcgcgtggtgcggggattatctatcccatcatccgtaacctgccaccgctctatcaatcacaaccaaacgacagcagttcgcgcagcattggctcgtacatcatgtggatggggattgttgccgattgcgtgaccagcgccattttcctgacggcgatggctccaaatttgctgttaattggactgatgaaaagcgcatctaacgccacgctgagctggggcgactggttcctcgggatgttgccgctcagtattttactggttctgctggttccctggctggcttacgtgctgtacccgccgatactgaagtctggcgatcaggtgccgcgctgggcagagacggaactgcaggcaatgggcccgctctgttcgcgtgaaaaacggatgctggggctgatggtaggcgcactggtgctgtggatttttggcggtgattatatcgatgccgcgatggtcggttacagcgtggtggcgctgatgctgcttctgcgcattatctgctgggacgacattgtcagtaataaagcggcgtggaacgttttcttctggctggcctcgcttatcaccctcgctaccggactcaacaacaccggttttattagctggtttggcaaactgttagcaggcagcttaagcggttattcgccaacgatagtgatggtggcgttgattgtggtcttttatctgctgcgctacttttttgccagcgccacagcgtatacctccgctctcgcaccgatgatgattgccgccgcgctggcgatgccggaaatcccgctgccggtgttctgcctgatggttggtgcggcaattggtctggggagcattcttacaccatacgccaccggacccagtccgatttactacggtagtggttatctgccaacggtggattactggcgactgggggcaatttttgggctgatattcctcgtgttgctggtgattaccggcttactgtggatgcccatggtgttgctttaagtgaggacggtgccggaaattgctctccggcacctaatagttttacgcggccggtaactctgccagcggccagcgcggacgcacgctaacgccgagatccgccgtcgcgcctgctttaaaccgcaccattccggcataggcgatcatcgcaccgttatcagtgcaaaattccggacgcgcgtagaacacttcgccacgacgctttttcatcatttcagccagcttcgcccgcagtgtgcggttagcactcacgccgcctgccatgaccagtcgcttaaagcccgtctgatccagtgctcgcttacacttaatcatcaacgtatcgaccactgcatcttcaaaggcgcgggcgatatcggcacgcgtctgatcgtcagtgccgttgtcacgtatggtatttgccgcgaaggttttcagaccagaaaagctgaaatccagccccggacggtcggtcatcgggcgcgggaagacaaagcgcccggcagtaccctgagccgccattttcgacagtaatggcccgccaggataatccagccccagcagcttcgcggttttatcaaacgcttcaccagccgcatcatcgatagactctccgagcagctcgtactgaccaatgccagtcacgctgattaactgcgtatgaccgccggaaaccagcagcgcgacaaacggaaattccggtgggttatcttccagcatcggcgctaacagatgtccttccatatgatgtaccgggattgccggaacgtcccaggcaaacgccagagaacgccccacggtcgcgccaaccagcagtgcgccgactaatcctgggcctgcggtataggccacagcatcaatgtcttttgccgttaaaccagactcctttagcgcctcctggatcaacggtacggttttacgcacgtgatcgcgggaggccagttcaggcacgacgccgccgtagtcagcgtgcaatttcacctgactatacaattggttggctaacaaacctttttcatcgtcgtaaatggcgatgccggtttcatcgcaggaagtttcaatacccagtacacgcatgacttgttttacctcgctttattaccgcgcagtgtaggaccaatgcgggttgatgtaaaactttgttcgcccctggagaaagcctcgtgtatactcctcacccttataaaagtccctttcaaaaaaggccgcggtgctttacaaagcagcagcaattgcagtaaaattccgcaccattttgaaataagctggcgttgatgccagcggcaaaccgaattaatcaaaggtgagaggcacatgccggtaattaaagtacgtgaaaacgagccgttcgacgtagctctgcgtcgcttcaagcgttcctgcgaaaaagcaggtgttctggcggaagttcgtcgtcgtgagttctatgaaaaaccgactaccgaacgtaagcgcgctaaagcttctgcagtgaaacgtcacgcgaagaaactggctcgcgaaaacgcacgccgcactcgtctgtactaattccccgagagcgttgctctccgatcagaccgagttgtagttgtaaggccgtgcttccgaaaggaatgcgcggcttattttcgtttatgaattgctaaaaatcggggcctatggctggacgaatcccacgcgtattcattaatgatctgctggcacgcactgacatcgtcgatctgatcgatgcccgtgtgaagctgaaaaagcagggcaagaatttccacgcgtgttgtccattccacaacgagaaaaccccgtcattcaccgttaacggtgagaaacagttttaccactgctttggatgtggcgcgcatggcaacgcgatcgacttcctgatgaactacgacaagctcgagttcgtcgaaacggtcgaagagctggcagcaatgcacaatcttgaagtgccatttgaagcaggcagcggccccagccagatcgaacgccatcagcggcaaacgctttatcagttgatggacggtctgaatacgttttaccaacaatctttacaacaacctgttgccacgtctgcgcgccagtatctggaaaaacgcggattaagccacgaggttatcgcccgctttgcgattggttttgcgccccccggctgggacaacgtcctgaagcggtttggcggcaatccagaaaatcgccagtcattggttgatgcgggcatgttggtcactaacgatcagggtcgcagttacgatcgtttccgcgagcgggtgatgttccccattcgtgataaacgcggtcgggtgattggttttggcggacgcgtgctgggcaacgatacccccaaatacctgaactcgccggaaacggacattttccataaaggccgccagctttacggtctttatgaagcgcagcaggataacgctgaacccaatcgtctgcttgtggtcgaaggctatatggacgtggtggcgctggcgcaatacggcattaattacgccgttgcgtcgttaggtacgtcaaccaccgccgatcacatacaactgttgttccgcgcgaccaacaatgtcatttgctgttatgacggcgaccgtgcaggccgcgatgccgcctggcgagcgctggaaacggcgctgccttacatgacagacggtcgtcagctacgctttatgtttttgcctgatggcgaagaccctgacacgctggtacgaaaagaaggtaaagaagcgtttgaagcgcggatggagcaggcgatgccactctccgcatttctgtttaacagtctgatgccgcaagttgatctgagtacccctgacgggcgcgcacgtttgagtacgctggcactgccactgatatcgcaagtgccgggcgaaacgctgcgaatatatctacgtcaggaattaggcaacaaattaggcatacttgatgacagccagcttgaacgattaatgccaaaagcggcagagagcggcgtttctcgccctgttccgcagctaaaacgcacgaccatgcgtatacttatagggttgctggtgcaaaatccagaattagcgacgttggtcccgccgcttgagaatctggatgaaaataagctccctggacttggcttattcagagaactggtcaacacttgtctctcccagccaggtctgaccaccgggcaacttttagagcactatcgtggtacaaataatgctgccacccttgaaaaactgtcgatgtgggacgatatagcagataagaatattgctgagcaaaccttcaccgactcactcaaccatatgtttgattcgctgcttgaactgcgccaggaagagttaatcgctcgtgagcgcacgcatggtttaagcaacgaagaacgcctggagctctggacattaaaccaggagctggcgaaaaagtgatttaacggcttaagtgccgaagagcgatcgggaagcccccgacagccgcactgagaggcagcggcaaatatataagtacgccctcgtaattatcgttggcggtaaacaaccgttggatttcagcgttaacagctgaaggacatcgggtcaatcgcccaacaccaacctcatgaaataagtgtggataccgtcttatggagcaaaacccgcagtcacagctgaaacttcttgtcacccgtggtaaggagcaaggctatctgacctatgccgaggtcaatgaccatctgccggaagatatcgtcgattcagatcagatcgaagacatcatccaaatgatcaacgacatgggcattcaggtgatggaagaagcaccggatgccgatgatctgatgctggctgaaaacaccgcggacgaagatgctgccgaagccgccgcgcaggtgctttccagcgtggaatctgaaatcgggcgcacgactgacccggtacgcatgtacatgcgtgaaatgggcaccgttgaactgttgacccgcgaaggcgaaattgacatcgctaagcgtattgaagacgggatcaaccaggttcaatgctccgttgctgaatatccggaagcgatcacctatctgctggaacagtacgatcgtgttgaagcagaagaagcgcgtctgtccgatctgatcaccggctttgttgacccgaacgcagaagaagatttggcacctaccgccactcacgtcggttctgagctttcccaggaagatctggacgatgacgaagatgaagacgaagaagatggtgacgacgataccgccgatgatgacaacagcatcgacccggaactggctcgcgaaaaatttgcggaactgcgcgctcagtacattgtaacgcgtgacaccatcaaagcgaaaggccgcagtcacgctgccgctcaggaagagatcctgaaactgtctgaagtattcaaacagttccgcctggtgccgaagcagtttgactacctggtcaacagcatgcgcgtcatgatggaccgcgttcgtacgcaagaacgtctgatcatgaagctctgcgttgagcagtgcaaaatgccgaagaaaaacttcattaccctgtttaccggcaacgaaaccagcgatacctggttcaacgcggcaattgcgatgaacaagccgtggtcggaaaaactgcacgatgtctctgaagaagtgcatcgcgccctgcagaaactgcagcagattgaagaagaaaccggcctgaccatcgagcaggttaaagatatcaaccgtcgtatgtccatcggtgaagcgaaagcccgccgtgcgaagaaagagatggttgaagcgaacttgcgtctggttatttctatcgctaagaaatacaccaaccgtggcttgcagttccttgacctgattcaggaaggtaacatcggtctgatgaaagcggttgataaattcgaataccgccgtggttacaagttctccacctacgcaacctggtggatccgtcaggcgatcacccgttctatcgcggatcaggcgcgcaccatccgtattccggtgcatatgattgagactatcaacaagctcaaccgtatttctcgccagatgctgcaagagatgggccgtgaaccaacgccggaagaactggctgaacgcatgctgatgccggaagacaagatccgcaaagtgctgaagatcgccaaagagccaatctccatggaaacgccgatcggtgatgatgaagattcgcatctgggggatttcatcgaggataccaccctcgagctgccgctggattctgcgaccaccgaaagcctgcgtgcggcaacgcacgacgtgctggctggcctgaccgcgcgtgaagcgaaagttctgcgtatgcgtttcggtatcgatatgaacaccgaccacacgctggaagaagtgggtaaacagttcgacgttacccgcgaacgtatccgtcagatcgaagcgaaggcgctgcgcaaactgcgtcacccgagccgttctgaagtgctgcgtagcttcctggacgattaatcggtaggccggatcaggtgttacgccgcacccggcactagtccctccgcacaaacgccaccttttcggtggcgtttttatcgcccacgcaccaccagcgcctggtccagctcgcgatacgcttcaaccagtttctccagtgaaacgcgacttaaaccgctgggatttggcagcacccaaatctgcgtcgaaccaatggtgagagtttgtttcccccactgtgcaccgcgctggctgaatccctgttcatatgcttgtttgcccagaatcgccaacgcctgcggctgataatcttctattttttcaattagcttacgcccgcctgcgtgcagttcctgctttgacacttcattggcttgcaccgttggacggtctaccagtttggtgacgccacaacgataatccagcagatgctgtgcctcctgcggcttcaactgacggtcggtaaacccggcctgatatatcaccttccagaagcggtttgccggatgagcaaagggaaaacccgttccggcggatgaaagaccagggttgataccgcaaaacacgacccgtaaccctggagccaaaatatcctcaaccatatttactcctttctaacatcaccaggaaaagtataacggattgaaaatacattgtttataaaaacagcaggcgcgcggtaatggctggattgcgacacggagttactttataatccgctaccatggccccttagctcagtggttagagcaggcgactcataatcgcttggtcgctggttcaagtccagcaggggccaccagacatagcaaaggctgacgagaaatcgtcagcctttttctttttatatatcagttactttgcgtgccagtaagccgccgcgcgtacccgctgtgggtcatactgttccgcttcaaagcgacggcttaaattcttaacgactttgccttcgccggttatccagatgaagtaatcatcggcagggatttgcatctgcgccagacgcgcatctaccgcctgctcatcatgtgccagccattcgatattaaaaccatcaaggtgcgcgagataatcctgacaggcgttatcccgcacgctaaccagcgcactaacttgcggtttaacggcaagtttgctcaacgtttccaggcggcggcgcagtgcgggcattccggattcatcgcagacatacagctgatacgcgtaatcctctggcaccaccagcgaaccgcgcggacctgccaccgtaagtttatcgcccggtttcgcctgcatcgcccagccgctggcgaccccaccgtcgtgaataaagaaatcgatcgccagttcatggcgtagttcgtcatacagcggcgtatagtcacgcgacggtgggcgtggtccttccggccagacgatgccctcttccgttaccgttggcggcacaaagtgagtgcctggttgaggaaagaagagcttgctgtgatcgtcaaagccgcgcgatgtaaaaccgtccagcgcctcgccgccaaggacaatgcgctgaaaaccggcgctgatacgctcaacgcgtagcacagtcagttcacggaagcgcagatcattgcgaacgcgctgcgggtagcggggggagttattcattgttatcgccttcatgatggtaatcagatatatctaaataaattccacaaatgataatgattgttaatcatgataaatgcaagtgatttgtagcactgatatatctgtagtctgataagacgcgcaacctcttatcaagcatcattgctcaatgccggatgcggcgtgaacgccttatccggcctacatgttgagtaaacctgcgtttaaaaatcatttttgtacttgcagtaatgcttatatcagatataaattagatatatctaattaagcaaaaggaggctgatatgagccatcatcacgaagggtgttgtaaacatgaaggccagccacgccatgagggctgctgcaaaggtgagaagtcagaacacgagcactgcggacacggtcaccagcatgaacacggtcaatgctgcggtggtcgccacggtcgcggcggcggtcgccacggtcgcggcggcggtcgtcgacaacgtttctttggtcacggtgaattgcgtctggtgattctggatattctctcgcgcgatgacagccacggttacgagttgattaaagcgattgaaaatctgacccaggggaattacaccccaagcccgggcgtcatctacccgacgctggattttctgcaggagcagtcgctgattaccattcgcgaagaggaaggtggtaagaagcagattgcgctgaccgaacaaggcgcgcagtggctggaagaaaaccgcgaacaggtagagatgattgaagaacgcatcaaagcgcgttgcgttggcgctgcgctgcgccagaacccgcaaatgaagcgggcgctggataattttaaagcggtgctggatttacgcgtcaaccagagcgatatcactgatgcacaaataaaaaagatcattgcggtgatcgaccgcgccgcttttgatattacgcaactggattaatcgccgcatccgccagtggcgcggtgcaattgccggatgcgacgcttgacgcgccttatccggcctacacccgctacacaccccgtaggcctgataagatgcgccagcatcgcatcaggcattgtgctccaaccgctggatccggcataccgattaatgcagcaccgtcaccgcgtcttccagtcggctggcgcggtgtttcaccatcgccgacacctgcgcactctcttccaccaactcggcgtttttctgggtgatcaggttaagctcatccactgcacgggtcaggctggaaagcccatcggcctgttccagcgttgaatggctaatctgagctatcaactgggtgacgttttttacctgcgccacaatatcttccatcgtccgtccggcggcgtgtacctgctgcgaaccagattgcaccttatcagcactggcatcaatcagcttgcgaatatcgttggcagcattggcgctgcggctggctaaatgacgcacttcccccgccaccactgcaaaacctttgccctgttcgccggcacgcgccgcttccaccgccgcattcagggccagaatattggtctgaaacgcaatatcgttaatcagcgaagtaatggtgccaatgcgctgggtactgtcggcaatatcgtccattgtcttgatcaccgtagtcatcgcctccccgccctgcactgccgcattactggcggtgatagaaagtttatcggcagccgacgccgtggcagagttctgtttcaccgacgccgccatttggttcatggtcgccaccgtttgctgaacgttatcaactgtctgctgggtatgttcgttcagttcatcggtgcctttcgccagcgtctcactgccgtttctgacactggacacctggcttgagacatcattaattagccaacggcacatcaggccaagctgccctaccgcacgtaatgtcagccccagctcatcgctgcgcttcagatgctcaacactattacgctctccggtcgccaccttcagtgcctgacgggcgacattttctatcgggcggacaatctgccattcaaaacaagcgcttgccaacaataccactaatgcacagaggatatacgtcaccaccggggcagcaacaaaccagagcatggccgccagcaagataaacatcagggtcatcactccacgcgcccgccagcgaagcggtaatgaaggcagttttcccaaccaacctttacgcaccaccaggcctttatgaatacgcttactggtccgtccggcgttcaacgctttgtacagcggctccaccgccgcgatctcttcatccgtcgcccgggtacgaatcgacatatagccactgatttttccctcgcgcaccatcggtaccgcattggcccgcacccaataatggtcgccatttttgcggcgatttttcacgatgccgctccagggctccccttttttcagggtgaaccacatatccgcaaacgccgcttttggcatatccgggtgacgcaccatgttgtgcggttgcccctgtaactcctgcaaggtatagccgctcacctgcacaaaagtgtcattagcatgagtgatatagctttgcagatcggtagtggacatcagagtggtgtcgtccgccagcggggtattttgctgggtgacatacggatgagaagacatgttcgcgtcctgtgcaggttatatggttgttaacttcttgtcagagtttatgtcggccccgctgcggttatctttaaccaattaatttgatttagatcgcaatttgcgactaaagcacaaatctaattccttgatttaaaatactttcactctgttactatacgaaaacgttaattaccttgcccaaaaatcaggcaattattgccctgaaagcgtgcatttgcgcagcaatcatcaaatccatacccgacaaaaaccgtgcaaaataacagcaaatgttagcaaatagcattaaatattgcgcaaatgataaccacatttgtgtttatcccgattttcgcgatcgcagccggagtggcgcaatccctgcaatacttaaatcggtatcatgtgatacgcgagcctccggagcatattttgaacaggttaccttcgagcgcatcagctttagcgtgcagcgcccacgccctgaatctcattgaaaagcgaacgttggatcatgaggagatgaaagcacttaaccgggaggtgattgaatacttcaaagagcatgtcaatccggggtttttagagtatcgcaaatctgttaccgccggcggggattacggagccgtagagtggcaagcgggaggtttaaatacgcttgtcgacacccagggacaggagtttatcgactgcctgggaggttttggaattttcaacgtggggcaccgtaatccagttgtggtttccgccgtacagaatcaacttgcgaaacaaccgcttcacagccaggagctgcttgatccgttacgggcgatgctggcgaaaacccttgcggcgctaacgcccggtaaactgaaatacagcttcttctgtaatagcggcaccgaatccgttgaagcggcgctgaagctggcgaaggcttatcagtcaccgcgcggcaagtttacttttattgccaccagcggcgcgttccacggtaaatcacttggcgcgctgtcggccacggcgaaatcgaccttccgcaaaccttttatgccactgctgccagggtttcgtcatgtaccgtttggcaatatcgaagccatgctcacggctcttaacgagtgcaaaaaaaccggtgatgatgttgctgcggtgatcctcgaaccgattcagggcgaaggtggcgtaattctgccgccgccaggctatctcaccgccgtgcgtaagctgtgcgatgagttcggcgcactgatgatcctcgatgaagtacaaacgggcatggggcgcacgggcaagatgttcgcctgcgagcatgagaacgtacagccggatatcctctgccttgccaaagcgctcggcggtggcgtgatgccgattggcgcaactatcgccactgaagaggtgttctcagtcctgttcgacaatccgttcctgcataccaccacctttggcggcaacccgctggcctgtgcggcggcgctggcgaccatcaatgtgttgctggagcagaacttaccggctcaggctgaacaaaaaggcgatatgttgctggacggtttccgtcaactggcgcgggaatatcccgatctggtacaggaagcgcgtggtaaagggatgttgatggcgattgagtttgttgataacgaaatcggctataactttgccagcgagatgttccgccagcgcgtactggtggccggaacactcaacaacgctaaaacgatccgcattgaaccgccactgacactgaccattgaacagtgtgaactggtgatcaaagcggcgcgtaaggcgctggcggccatgcgagtaagtgtcgaagaagcgtaatatcaaatcggatggcgattcgacgtcgccatccgattgttttatacgatacgaacgcccgcaggcatcatccgctccggcgttaacaacacgctttcactgccgtcatcggtttccgcacacagcagcatgcattccgacgtttcaccgcgcattttcgctttttgcagattgcataagaccaccaccgttttccccatcagctcttcttcgctgtagtacggcaccaggctggtcacggtttgcagtgttttttcccccacatcaacctgtacgatgtacagcttgtcggcgttttcatggcgtttcacttccacaatctttccgacgcgcatttccagacgtgcaaaatcagcgtaagccacggtttccattgtttcctccctttgggtaaaattttactaaactatagcaaaagtttttctcaatcctgtaggctaaaaatggagaatgcaggcgtgatcacattcgtgagccgctgtgttaccgttacagcgtcaaagaaacgcgctttatttactgaaaacaggtgacccgataagcacttcctctacaatgggggcgcacatcagggaaagtaaaaaaggtaaacatggcaacactaaaagacatcgcaatcgaagctggcgtatccctggcgacagtatccagggtcttaaatgacgatccaacattgaatgtgaaagaagagacgaaacatcgcattctggagatcgccgaaaagctggagtacaagaccagtagcgcccgtaaactccagacaggtgcagtcaaccaacatcatattctggctatctacagctaccagcaggagctggagatcaacgatccttactatctggcgatccgccacggcattgaaactcagtgcgaaaagctggcgatcgaactgaccaactgttatgaacacaacggtttaccagacattaaaaacgtcaccggtattttaattgtcggcaaacccacgcccgccctgcgcgccgccgcctgtgcgttgaccgacaatatctgttttatcgactttcacgaacccggcagcggttacgatgcggtggatatcgatctggcacgtatcagtaaagaaatcatcgatttctatatcaatcagggcgttaatcgtattggttttattggcggtgaagacttacccggcaaggcggatattcgtgaggtcgcctttgcggaatatggtcgtctgaaacacgtggtacgcgaagaggatatctggcgcggcggtttttccagttcgtcgggctatgaactggcaaaacagatgctggcgcaggaagactatccgaaggcactgtttgttgcttccgattccattgctatcggcgtactgcgggcaattcatgaacgtggcctgaacatcccacaggatatttcgcttatcagcgttaacgatatccccaccgcgcgatttacctttccgccgctctccaccgtgcgcatccattccgagatgatgggaagtcagggcgttaacctggtgtatgaaaaagcccgcgatggtcgcgcgctgccgctgttggtcttcgttcccagcaaattaaaactgcgcggcacgacccgttaaatccccttgcacgctgtccagcaatcgtttttgccggacagtgctgccgtttattttcgtgatccagttaaagtaaatgcatttactcgctactttttagtaaaatttttactaaactccccagcaattacacaaactaccatcaccatgaatggttccgatttctctctaccgggaggccctatgaatcgctgggaaaacattcagctcacccacgaaaaccgacttgcgccgcgtgcgtactttttttcatatgattctgttgcgcaggctcgtacttttgcccgtgaaaccagcagcctgtttctgcccttaagcggtcagtggaatttccacttttttgaccatccgctgcaagtgccagaagccttcacctctgagttaatggctgactgggggcatattaccgtccccgccatgtggcaaatggaaggtcacggcaaactgcaatataccgacgaaggttttccgttccccatcgatgtgccgtttgtccccagcgataacccaaccggtgcctatcaacgtattttcaccctcagcgacggctggcagggtaaacagacgctgattaaatttgacggcgtcgaaacctattttgaagtctacgttaacggtcagtatgtggggttcagcaagggcagtcgcctgaccgcagagtttgacatcagcgcgatggttaaaaccggcgacaacctgttgtgtgtgcgcgtgatgcaatgggcggactctacctacgtggaagaccaggatatgtggtggtcggcggggatcttccgcgatgtttatctgatcggaaaacaactcacgcacattaacgatttcaccgtgcgcaccgactttgacgaagcctattgcgatgccacactttcctgcgaagtggtgctggaaaatctcgccgcctcccctgtcgtcacgacgctggaatataccctgtttgatggcgaacacgtggtgcacagcagcgccattgatcatttggcaattgaaaaactgaccagcgcccgctttgcttttactgtcgaacagccgcagcaatggtcagcagaatccccttatctttaccatctggtcatgacgctgaaagacgccgacggcaacgttctggaagtggtgccacaacgcgttggcttccgtgatatcaaagtgcgcgacggtctgttctggatcaataaccgttatgtgatgctgcacggcgtcaaccgccacgacaacgatcatcgcaaaggccgcgccgttgggatggatcgcgtcgagaaagatctccagttgatgaagcagcacaacatcaactccgtgcgtaccgctcactacccgaacgatccacgtttttacgaactgtgcgatatctacggcctgtttgtgatggcggaaaccgacgtcgaatcgcacggctttgctaatgtcggcgatatcagccgtattaccgacgatccgcagtgggaaaacgtctacgtcgagcgcattgttcgccatattcacgcgcagaaaaaccatccgtcgatcatcatctggtcgctgggcaatgaatccggctatggctgtaacatccgcgcgatgtaccatgcggcgaaggcgctggatgacacgcgactggtgcattacgaagaagatcgcgatgctgaagtggtcgatattatttccaccatgtacacccgcgtgccgctgatgaatgagtttggtgaatacccgcatccgaagccgcgcatcatctgtgaatatgctcatgcgatggggaacggaccgggcgggctgacggagtaccagaacgtcttctataagcacgattgcattcagggacattatgtctgggaatggtgcgaccacgggatccaggcgcaggatgacaacggcaacgtctggtacaaattcggcggcgactacggcgactatcccaacaactataacttctgtcttgatggtttgatctattccgatcagacgccgggaccaggcctgaaagagtacaaacaggttattgcgccggtaaaaatccacgcgctggatctgactcgcggcgagttgaaagtcgaaaataaactgtggtttaccacgctagatgactacaccctgcacgcagaggtgcgcgccgaaggtgaaacgctcgcgacgcaacagattaaactgcgcgacgttgcgccgaacagcgaagcccccttacagatcacgctgccgcagctggacgcccgcgaagcgttcctcaacattacggtgaccaaagattcccgcacccgctacagcgaagccgggcattctatcgccacttatcagttcccgctgaaggaaaacaccgcgcagcctgtacctttcgcaccgaataacgcccgtccgctgacgctggaagacgatcgtttgagctgtactgttcgcggctacaactttgcgatcaccttctcaaaaacgagtggtaaaccgacatcctggcaagtgaatggcgagtcgctgctgacccgcgagccaaagatcaacttcttcaagccgatgatcgacaaccataagcaggagtacgaagggctgtggcagccaaatcatttgcagatcatgcaggagcatctgcgcgattttgtcgttgagcaaagtgatgatgaagtgttgctagtcagccgcacggttattgccccaccggtgtttgacttcgggatgcgctgcacctacatctggcgcatcgctgccgatggccaggttaacgtggcgctttccggcgaacgttatggcgactatccgcacatcattccgtgcatcggtttcaccatgggaattaacggcgaatacgaccaggtggcgtattacggacgtggaccgggcgaaaactacgccgacagccagcaggctaacatcatcgatatctggcgcagcaccgtcgatgccatgttcgagaactatcccttcccgcagaacaacggtaaccgtcagcatgtccgctggacggcactgactaaccgccacggcaacggtctgctggtggttccgcagcgaccaattaacttcagcgcctggcactatacccaggaaaacatccacgctgcccagcactgtaacgagctgcagcgcagtgatgacatcactctgaatctcgaccaccagctgcttggcctcggctccaactcctggggcagcgaggtgctggactcctggcgcgtctggttccgtgacttcagctacggctttacgttgctgccggtttctggcggagaagctaccgcgcaaagcctggcgtcgtatgagttcggcgcagggttcttttccacgaatttgcacagcgagaataagcaatgaggatcatcgataacttagaacagttccgccagatttatgcctctggcaagaagtggcaacgatgcgttgaagcgattgaaaatatcgacaacattcagcctggcgtcgcccactccatcggtgactcattgacttaccgcgtggagacagactccgcgaccgatgcgctatttaccgggcatcgacgctattttgaagtgcattactacctgcaagggcagcaaaaaattgaatatgcgccgaaagagacattacaggtagtggaatattatcgtgatgaaactgaccgtgaatatttaaaaggctgcggagaaaccgtagaggtccacgaagggcaaatcgttatttgcgatatccatgaagcgtatcggtttatctgcaataacgcggtcaaaaaagtggttctcaaagtcaccatcgaagatggttatttccataacaaataacaactacggcggcaaaaggagtttgccgccaccgctaccctactcattttcggagatgtgttatgtctgataccaaacgtaatacaatcggcaaattcggcttgctctcgctgacttttgccgccgtttacagctttaacaacgttatcaataataatattgagcttggactggcctcggcaccgatgtttttcctcgcaacaattttttattttattcccttctgtctgatcatcgcagaatttgtttcgttaaataaaaactcagaagccggtgtctacgcgtgggtaaaaagttcgctgggcggacgttgggcatttattactgcctatacctactggttcgtaaacctgttctttttcacctcgttgttgccgcgcgttattgcttatgcttcgtatgccttcctcggctacgaatatattatgacgccggttgccaccaccattatcagtatggtgctgttcgccttctccacctgggtttccaccaacggggcgaaaatgctggggccaatcacctccgtcacttcaacgctgatgctgctgttaacgctctcctacattttactggcaggtacggcactggttggcggcgtacagcctgccgatccgatcaccgttgacgcgatgatcccgaacttcaactgggcgttcctcggcgtgaccacctggatctttatggccgcaggtggcgcggagtccgtcgctgtgtacgttaacgacgtcaaaggcggttcgaaatcgttcgttaaagtgatcatcctcgccgggatttttatcggcgtactgtattccgtctcctcggtgctgattaacgtcttcgtcagcagcaaagagttgaaatttactggcggatcggtacaggtattccacggcatggcggcgtattttggtctaccggaagcactgatgaatcgctttgtcggtctggtgtcctttaccgcgatgttcggttccctgctgatgtggacggcaacgccggtgaaaattttcttctccgaaattccggaaggcatctttggtaagaaaaccgtcgaactgaacgaaaacggcgttccggcgcgcgcagcgtggatccagttcctgatcgtcatcccgctgatgattatcccgatgctcggttccaataccgtgcaggatctgatgaataccattattaatatgaccgccgcagcgtccatgcttccgccgttattcatcatgctggcttacctgaatttacgcgccaaattagatcacctgccacgcgatttccgtatgggctcccgccgcaccggtattatcgttgtttcaatgctgattgcgatatttgccgtagggtttgtcgcttcgacattcccgactggcgcgaatattctgaccatcattttttataacgtcggcggtattgttatcttcctcggctttgcgtggtggaaatacagtaaatatataaagggattaacggctgaagagcgccatattgaggcgacaccagccagcaatgttgattaagcagaataataaaaaatgagcaggcattttccctcttcctggatggggagagggaaaatagtttctgcctttatatttttataattacaacgataaaaggctgtactttttctttagctcatggattaacataatgaaattaatcactgcaccatgcagagcattacttgcgctgccgttttgctacgccttttctgtgaccgctgatgaagcacgtccggcagaacatgacgacacaaaaacccccgcaatgacctcgacatcttctccttcatttcgtttttacggcgaattaggggttggtgggtatatggatttagagggtgagaataaacataaatacagcgacggcacctatattgaaggtggcctggagatgaagtacggctcctggttcggcctgatttacggcgaaggctggaccgtgcaggccgaccacgacggtaatgcctgggtgcctgaccatagctggggtggtttcgaaggtgggattaaccgtttctatggcggttatcgtaccaatgatggcaccgaaatcatgctcagtctgcgtcaggattcctcgctggatgacctgcaatggtggggcgatttcacgcccgatctgggctacgtcattcccaatacccgcgacattatgactgcgctgaaggtacagaacttaagcggcaactttcgttatagcgttaccgccacacctgccggacatcatgacgaaagcaaagcctggctacattttggcaagtacgatcgctacgacgacaaatacacctatccggcaatgatgaacggttacatccagtatgaccttgcagaaggtatcacctggatgaacggtctggaaatcaccgacggcacaggccaactctatctcacgggcctgcttacccctaactttgccgctcgcgcctggcaccataccggacgcgccgacgggctggacgtatcgggaagtgaaagcgggatgatggtgagcgccatgtatgaagcgttaaagggcgtttatctctccaccgcttacacctacgccaaacatcgccctgaccacgctgacgatgaaaccacctctttcatgcagtttggtatctggtacgaatacggcggcggacgtttcgcaacggcttttgatagccgcttctacatgaaaaatgcctctcacgatcccagcgaccaactcttcctgatgcaatatttttactggtaataaggacagtaatctcatgaaaataaaaaccattttaacgccagtagcctgtgctctgctgatgagcttttccgcccatgccgctaacgctgacaattataaaaacgtgattaaccgtactggcgcgccgcagtacatgaaggattacgattacgacgatcaccagcgttttaatccgtttttcgatctcggagcctggcatggtcatctgttgccagacggcccgaacactatgggcggctttcctggcgttgcgctgctgacggaagaatacatcaactttatggccagcaatttcgatcgcctgaccgtctggcaagacggcaagaaagtcgatttcacgctggaggcatacagtattcccggcgcgctggtgcaaaagttgatatcgaaagatgtacaggtcgaaatgattctgcgcttcgccacgccgcgcacatcactactggaaaccaaaatcaccagcgataaaccgctggatctggtgtgggatggtgaactgctggaaaaactggaagcgaaagaagggaaaccgctttccgataaaaccattgctggcgagtaccctgactatcagcgcaaaatcagcgccacccgtgatggcctgaaagtcacctttggcaaagtgcgcgccacctgggatctgctgacctccggtgaatcagaatatcaggtgcataaatccctgccagtgcagactgaaatcaacggcaatcgctttaccagtaaggcgcatatcaacagttcgacgacgctctataccacctactcccatctgctgaccgctcaggaagttagcaaagagcaaatgcagatccgcgatattctggcgcgtccggcgttttatctcaccgcctcgcagcaacgctgggaagagtatctgaagaaagggttaaccaatccggatgcgacgccggaacagacgcgcgtcgcggtgaaagccatcgaaacgctcaacggtaactggcgatcgccgggcggtgcggtgaaatataacaccgtcacgccgtcggtgaccgggcgctggttctccggcaatcagacctggccgtgggatacctggaagcaggcgtttgcgatggcgcatttcaatccggatatcgccaaagagaatatccgcgcggtcttctcctggcagatccagccaggcgacagcgtgcgtccgcaggatgtgggctttgtccccgacctgatagcgtggaaccttagccccgagcgtggcggcgatggcggcaactggaacgaacgtaacaccaaacccagccttgccgcctggtcggtgatggaagtgtacaacgtcacccaggataaaacctggctggcagagatgtacccgaaactggtggcctatcacgactggtggctacgtaaccgcgatcacaacggcaacggcgtaccggaatatggcgcaacccgcgataaagcccacaatactgataatggcgagatgctgtttacagtgaaaaaaggcaataaagaagagacgcagtctgggctgaacaactacgcccgcgtggtggagaaaggccagtacgacagtctggaaattccggcacaggttgcggcgtcgtgggaatcggggcgtgatgatgccgccgtctttgggtttatcgacaaagaacagttggataaatatgtcgctaacggcggcaaacgtagcgactggacggtgaaattcgccgagaaccgcagtcaggacggaacgttgctgggctactcgctattgcaggagtcggtggatcaggccagctatatgtacagcgataaccattatctggcggagatggcgacgattctcggtaagccggaagaggccaaacgctatcgtcagttagcacaacagctcgcggactacatcaacacttgtatgttcgacccgactacacagttctactatgacgtgcgtattgaagataaaccgctggcgaacggctgcgcgggcaaaccgattgtcgagcgcggtaaagggccggaaggctggtcaccgctgtttaacggtgcggcaacgcaggccaacgccgacgcggtggtgaaggtgatgctggatccgaaagaattcaacacctttgtcccgctggggacggcagcgttaaccaacccagcctttggcgcagatatctactggcgcgggcgcgtatgggtggatcagttctggtttggtctgaaagggatggagcgttacggttatcgcgatgacgccctgaaactggctgatacgttcttccggcacgccaaaggattaaccgccgatggcccaattcaggagaattacaacccgctcactggcgcgcagcaaggcgcaccaaatttctcctggagtgccgcgcatttgtatatgttgtataacgatttttttcgtaagcagtaattagcaacggctggcggatgcggcgtaaacgccttatccgccctacatgtgcaatcccccaggccggataagacgcgtcaagcgtcgcatccggcgttaccaccgggcgtattctttttgaatcccatcacaaaccccgcactccccttttcccttttctccggcgacggctaaattagaactcatccgaccacataacaattattttacatactggacaattttatgagctacccgtcgctgttcgccccgctggatttaggttttaccacgttaaaaaaccgcgtgttgatgggttcaatgcacaccgggctggaggaatacccggacggcgctgaacggctggcagcgttttatgccgaacgcgcccgtcacggcgtggcgttgattgtcagcggcggtatcgcaccagatttaacaggcgttggcatggaaggcggtgcaatgctcaatgacgccagccagatcccacaccatcgcaccattaccgaagccgtacatcaggaaggcggcaaaatcgccctgcaaattttgcataccgggcgctacagctaccaaccgcatctggtcgctccctccgcattgcaggcccccatcaaccgtttcgttcctcacgaactcacccatgaagagatcctgcaactgatcgacgatttcgcccactgcgcgcaattggcacgggaggcaggatacgacggtgtagaggtgatggggtccgaagggtatttgatcaacgaatttctgacgctgcgcaccaatcagcgtagtgaccagtggggcggcgattaccgcaaccggatgcggtttgccgtagaagtagtgcgtgcggtgcgcgaacgtgtcggcaacgacttcattattatctaccgactgtcgatgctcgacctggtcgaaggcggcggtacttttgccgaaatggtagagctggcgcaggccattgaagcggcgggcgcgaccattatcaacaccggcattggctggcatgaagcacgtattccgaccattgccacgcccgtgccgcgcggtgcctttagctgggtcacgcgcaaactgaaaggccacgtttcgctgccgctggtgaccaccaaccggattaacgatccgcaggttgccgacgatattctctcgcgcggcgatgccgatatggtatcgatggcgcgaccgtttcttgctgatgcggaactgctgtcaaaagcgcaatcgggacgagccgatgagatcaacacttgtattggctgcaaccaggcctgtctcgatcagatcttcgttggcaaagtcacctcgtgcctggtgaatcctcgcgcctgccatgaaaccaaaatgccaatccttcctgccgtgcagaaaaaaaatctggcggtggtcggtgcgggacctgctgggctggcgtttgccattaacgcggcggcgcgtgggcatcaggtaacattgtttgatgcgcacagcgagatcggcgggcagtttaatatcgccaaacagatccccggcaaagaggagttttacgaaacgcagcgctattaccgccggatgatcgaagtgacgggtgtgacgctaaaactcaatcacaccgtgacagcggatcagttacaggcgttcgatgaaacgatcctcgccagtgggatcgtgccgcgcgttccgcctatcgacgggatcgatcatccgaatgtattgagttatctcgatgtactgcgcgacaaagcgccggtgggcaacaaagttgccatcatcggttgtggcggaattggttttgatacggcgatgtatttaagtcagccgggcgaatccaccagccagaatatcgccgggttctgtaatgagtggggaatcgacagtagcctgcaacaggccggaggtttgagtccgcaaggcatgcagatcccccgtagcccacggcagattgtgatgctccagcgcaaagccagcaaaccaggacaagggttaggcaaaaccaccggctggatccatcgcaccaccctgctctcacgcggcgtgaaaatgatcccaggcgtaagttaccagaagatcgacgatgacgggctgcatgtagtgatcaacggcgaaacgcaggtattagcagtggacaatgtggtgatctgcgcggggcaggagccaaaccgcgcattggcgcaaccgctgattgatagtgggaaaactgtgcatttaattggcggctgcgatgtagctatggagctggacgcacggcgggcaattgcccagggaacacggctggcgctagagatttaaatcgttgtttgaagcgccggatgcgacgcatccggcacgtcgcgttaatcaataaacaaggcgggagaaatgccgaatcgcgttgccagttttttagcgtgttccagcgttaatttcctcttcccgctcaaaacgcgtgacaccatcgatttactgccaatttccggaagatcggaaagggttaaaccatattgatccataagggtacgaatcacagctataccgccaggcatggcttgcgccatggcattaaattcagcaaattcgggcgctgattcttcccacgcggttattttggcacacaccagatccagcaaggggttttcaggatcgttgagcagcagatgatctaccagttccagcgcctgggtgtattgttcctcgttctgaatacccgccagaaaaggtgccacagcagttagcttttctcctgcttgcaagatgtcggcaatcgcaatcattttttccccttagtacgatgaacggcggtaaagaaatcgtattctttatgcgtcataacttcacgtatgtagcataaacgttgaacaacgctaaacaagagaatgtagaggatggtgacagggattttttgttttatggaagcgcgattccagaactgggcagacattgccggatgcgacgcttgccgcgtcttatccgacctgggggtaatgtgctgaacgtatgccggataaggcgtttacgccgcatccggcaggtaacccccaatcttaccgacgacgccccagcttcactgctttcagcaccacaaatttattattcgtggcgatggtggtgcagttgccgaaaattttcttcagtttatggaagtaatccaggtgacggttggcaacgatatacagctcgccgttgattttcaggcagcggcgggcatggtggaacatctcccaggcgacgttatcggtcagcgcatgttgctgatgaaacggcgggttgcagagcacagcattaaaacggaaaggctccacgccggagagcgcgttgttgatcataaactcgcagcgatccaacgcctcgggcatgttggtttctacgtttaaccggctggaagcaaccgccatcggcgattcatcgacaaacaccactttcgcctgcgggtttttatcgagcaatgtcaggccaataacgccattaccgcaaccgagatcgacaatctcaccttcgagattctctggcagatgttgcataaagaagcgcgcgccaatatccagcccagtgcgggagaaaacattcgcatggttgtggatagtccagtcagtgccttccagcttccagctaacggtctgcggcgcatcggccaacggcggttcgttgaaggtgcagttaatcaggcgcgctttcttccatgccagcgtggtggtggtcgggccgagcactttttcgaacagttccagcgtggaagtgtggatgtcacgggctttggcaccggcaataatacgtgtatccggcgtgaccactttgcgcagcgcgcgcagttgttgttccagcaacgccagtgttttcggtactttgatcagtaccacgcccggctgttgcgggtagtcggcggtgctgtcgagaaacttcacgctcgactcatcaatcccgttgaggcgtaaattctcgcgcgtcgccagttcgctgatgtatgagtcgccaatgctgtatggcttatgttccgccagcgcacaacttaacgcaccaaaggcatcattcaggatcaacaccgggccgcggatttctgtgtcgtccaactgttgcagcaaatattcatccgccgcttcccacgcctgtagtgggtttacgtcatccgtcgccggaaaacgttgtagtgtcagtgaacggaaaccgttgtctaagtggctcatcggccctcctgaatgataaaatttcgacgttgcccctgaaaagggtgcgtgagtataccctttttctctttttcgtgggcggttatgagcaatcttacttatcttcagggttatcccgagcagctactttcccaggtgcgaacgctgataaacgaacagcgtctgggcgatgtgctggcaaaacgctatccgggaacacacgactacgccaccgataaagccctctggcaatatactcaggatcttaaaaatcagtttctgcgcaatgccccgccgatcactaaagtgatgtatgacaacaagatccatgtgctgaaaaatgcgctcgggttacataccgctgtttcgcgtgtgcagggcggcaagctgaaagcaaaggcggagatccgcgtcgctaccgtgtttcgcaacgcgccggaaccgtttttgcgcatgatcgtggtgcacgagttggcgcacctgaaggagaaagagcataacaaagcgttctatcaattgtgctgccatatggagccgcagtaccaccagcttgagttcgacacccggctgtggctaacgcagttgtcgcttgggcaggacaaaatctgaaaatgatgtcaggcgttattttttcctcctttagcgcctaaaatcgacctcctccctttcgttaaggatgacgaccatgctgcgcgcatttgcccgccttcttctccgtatttgtttttctcgccggactcttaaaattggctgtttattgttgcttatagcaggagcaaccctttttattgccgatcgcgttatggtcaacgccagccaacaactgacctggagcgatgtcaacgccgttccggcgcggaacgtgggtttattgctgggggcgaggccgggtaatcgctactttacccgacgtattgataccgcagcagagttgtaccacgccggaaaagtgaaatggctgttagttagtggcgataacggacgtaaaaattacgatgaagcgtcaggaatgcagcaggccttgatcgctaaaggcgtaccagcaaaagtgatcttctgcgactatgccggattctcaacgcttgattcggtggtgcgtgccaaaaaggtgtttggtgaaaaccatatcaccattatctcgcaagaatttcataatcaacgcgccatctggctggcaaagcaatacggcatcgacgctatcggttttaacgcgccagacctcaatatgaagcacggtttttatactcaactgcgggagaaactcgctcgtgtcagcgcggtgattgacgcaaaaatcctccatcgccagccgaaatatctcgggccgttggttatgattgggccgtttagtgagcatggctgtccggcaaaagaataatgcgtatctgcgcacgtcgaagataaaaaaggcgtgctacagtgacgagagaatccctttatggagtatccacgcgttatgatacgtttcgctgtgattggtacgaactggatcactcgccagttcgtcgaggccgcccatgagagcggtaaatacaagttaaccgccgtttattcccgcagtcttgaacaggcccagcacttcgccaatgatttttctgtcgagcatctgtttacgtcgctggaagcgatggcagaaagcgatgccattgacgcggtgtatattgccagcccgaattccctgcacttttcccagacacaacttttccttagtcacaaaattcatgtgatttgcgagaaaccgctggcgtcgaatctggcggaagtggatgccgccattgcctgtgcgcgggaaaatcaggtggtgctgtttgaggcatttaaaacggcctacctgccgaactttcatctgttacgccaggcgctgccgaaagtcggcaaactgcgtaaagtctttttcaactattgccagtattcctcgcggtatcaacgttacctggatggtgagaatcccaacacctttaatccggcattctctaacggttcaattatggatatcggcttttactgtctggcgtcagcggtggcgttatttggtgagccgaaaagcgtgcaggcaaccgccagtttgttggcaagcggcgtagatgcccacggcgtggtggtgatggattacggtgatttcagcgttacgttgcagcactcaaaagtgagcgattctgtcctggcaagcgagattcagggcgaagcgggatcgctggtgattgaaaaactgtctgaatgccagaaagtttgctttgttccgcgtggcagccagatgcaggatctcacccaaccgcagcatattaataccatgctctacgaagcagagctgttcgctaccctggtggatgagcatctggtggatcatccagggctggcggtcagtcgcatcaccgccaaactgctgaccgagatccgccgccagactggggtgatttttccggcagatagcgtaaaactataaattgccaaagtaaaacagtgtaaaaggtatgtaacagaccattgactgactgaatggtctgtcatactttgttacctgcaaaggggagtaacttcattgccggtcgatcgtcattacgatgtgtgaaaaaccacatccggtcaccgggcaacccgaaaggaatacgcagacgtattccttttttgttgtaagtgagaccttgccggaaggcgaggtctatgcataaaaagcagcggctgacgtcttccgacgttggccgtttttttatgtgtaaggaacttctatgaatactgtcggcacgccgttgctatggggcggattcgctgttgttgtcaccattatgctggctatcgacctgttgttgcaggggcgtcgtggggcacatgccatgaccatgaaacaggctgcggcctggtcgctggtctgggtgacgctgtcgttactgtttaacgccgctttctggtggtatctggtgcaaaccgaaggtcgcgccgttgccgatccacaggcactggcctttctcacgggttatctgattgagaaatcgctggcggtcgataacgtctttgtctggctgatgttgttcagctatttctctgttccggcggcattacaacgccgcgtgctggtgtatggcgtactcggggcgattgttctgcgtaccatcatgatcttcactggtagctggctgatttcacagttcgactggatcttgtatatcttcggtgccttcctgctgtttaccggcgtgaagatggcgctcgcccatgaagatgaatcaggcattggcgacaagccgctggtgcgctggctacgcggtcatttgcgcatgaccgacaccatcgacaacgagcatttctttgtgcgtaaaaatggtttgttgtatgccacgccgctgatgctggtgctgattctggtggagttgagcgacgtgattttcgccgtggatagtattccggctatcttcgccgtgaccaccgatccgtttattgtgctgacctcaaacctgtttgcgatcctcggcctgcgtgcgatgtatttcctgctggcaggtgtggcagagcgtttctcgatgctcaaatatggtctggcggtgattctggtgtttatcggtatcaagatgctgattgtcgacttctaccatattccgatcgccgtctcgctgggcgtggtgtttggcattctggtgatgacgtttattatcaacgcctgggtgaattatcggcatgataagcagcgggtagaataatttttaatctgcctaagccgtgtactctgtcatcaacatgagcaccgttttctccctctccccaaaaggggcgaggggactgaccgagtacttttttgacgttgtcatcagtctggaagccgcacgttgggctttattttcatgtcaaacaaatgtaaccattaagttgcgaaatatgacttctctttaaaatccagcatatttcgcttcccgaagctgtaactttccttatactcgaccttgcaaacactttgttacatcctgaaagatgcgtcgacagaacgcaccagggatgtgcgacaacacaatgaaaggatcgaaaaatgactacgcaacattcaccggggctattccggcgtctggctcatggcagcctggtaaaacaaatcctggccggccttattctggggattcttctggcatggatctcaaaacccgcggcggaagctgttggtctgttaggtactttgttcgtcggcgcactgaaagccgttgcccccatcctggtgttgatgctggtaatggcatctattgctaaccaccagcacgggcagaaaaccaatatccgccctattttgttcctctatctgctgggcaccttctctgctgctctagccgcagtaatcttcagttttgccttcccttctaccctgcacttgtccagtagcgcggatgatatttcgccgccgtcaggcattgtagaagtgatgcgcgggctggtaatgagcatggtttccaaccccattgacgcgctgctgaaaggtaactatatcgggatcctggtgtgggcaattggcctcggtttcgcactgcgtcacggtaacgaaaccaccaaaaacctggtcaacgatatgtcgaatgccgttacctttatggtgaaactggtgattcacttcgcaccgatcggtatttttggtctggtttcttctaccctggcaaccaccggtttctccacgctgtggggctacgcgcaactgctggtggtactggttggctgtatgctgctggtggcgctggtggttaacccactgctggtatggtggaaaattcgtcgtaacccgttcccgctggtgctgctgtgcctgcgcgaaagcggcgtgtatgccttcttcacccgcagctctgcggcgaacattccggtgaatatggcgctgtgtgaaaagctgaatctggatcgcgatacctattccgtttctattccgctgggagccaccatcaatatggcgggcgcagcaatcaccattaccgtgttgacgctggctgcggttaatacgctgggtattccggttgatctgcccacagcgctgctgttgagcgtagtggcttctctgtgtgcctgtggcgcatccggcgtggcgggggggtctctgttgctgatcccactggcctgtaatatgttcggtatttcgaacgatatcgccatgcaggtggttgctgtcggctttattatcggcgtattgcaggactcctgtgaaaccgcgctgaactcgtcaactgacgtgctgttcactgcggcagcttgccaggcggaagacgatcgtctggcaaatagcgccctgcgtaactaatacttagcccctttcgtctacggcggaaggggttttctccactttaaacggatcaattccccttctctgcatacgccagaaacgaatgatattcaggccattcatcagcagaaaactgccttcaatcatcgtgccgcctatcgaccccgcccagaagttgtgaatcacccagcaacacgttgaaaaccacattacgcagcgcatggtcagccctttacagcggaacagcgcccaggtactgacaatcgtgccgattaccggcaatagttcgacaggatgatggaacttcgcgaggccaattccgccagtcagcacaataaaaatcgccattacccataagctgcgcgtgcgtaaggtaatcaatgtacgaatggcattaaggatggcactggcaccggcaggataggtgcccagaagaaaaaaatgtacgccaataacggcgctatagaccgaaagttgctttttgaagcgacgttcgtcacgattgaaaaatgttgtgataccaatcagaaaggcgatgacacccacgccctgggccagccaatacgcggtcatgataaatccttagcaggtatggaaaagcaaacggcgcttcacattatgaaacgccgttttttattaacaactcatttcgactttatagcgttacgccgcttttgaagatcgccagttcgcggaagtcgttacgctcgttgcaggtttgcttaccgttggcaaactcaacgatggtgtcgataaattcttccagcaactgcggcatcgctttaccgtggatcagctgacccgcgtcaaagtcgatccagtgttttttcttcgccgccagttcgctgttggtggcgattttcaccgtcggtacaaagccgccgtacggcgtgccgcgaccggtactgaacagcaccatatggcagcccgcacccgccagggcgctggtcgctacggcatcgttacccggcgcacttaacaagttcagccccggcgttttcagacgctcgccgtaacgcagcacgtcaaccacgacactggaacccgctttctgggtacagccaagcgatttatcttccagcgtggtgataccgcctgctttgttccccggtgatgggttttcgtagatcggctggtcatgggcaataaagtactgcttgaagtcattgaccatggtgaccagtttttcaaacgttgcttcgtcgcgacaatggtccatcagcaactgctctgcgccaaacatctccggcacttcggtcagtacggtagtaccgccgttagcaatcacgtagtcagagaaacgccccagcatcgggttagcagtaataccagaaagaccgtcagaaccaccgcactccagaccaaacttcagttcgctgagtttgcccggctcgcgtttatcgttgcgcatcacgctatacagctgatgcaaatgcgcgatcccggcctcgatttcatcatcctgctgttggcagatcatgaaatgaacgcgttcaggatcgatatcgcccaacgtttcacggaatgcggcaacctggttattttcgcaacccagaccaatcaccagcactgcgcccgcgttcgggtggcgcaccatgttttgcagcatggtgcgagtattgatgtgatcgtcgcccagttgtgagcagccgtaggtgtggctgaagaggaacacgccgtcggtaccttcagcgttgttggtctctttcaggaaacgattttggatctgccgcgcgatgccgttgacacagcccacggttggcaggatccacagctcattacgcaccccgacatcgccgttagcgcgacgatagatctgcacttcacgatctgccgcttgcgcaggcagatcctgaaaatcaggttgatagcgatactgatccagatcgctcagattcgtgcgcgtattgtgggcgtgaacgtgttcccccgctgcaatatccgccaatgcataaccaatcggcaggccatatttaatgacgttggccccttttgcgatatccgttaacgcaaatttatgtccacgagcaacatcctggcgcagcgtaacagtctggttatcgacactgacttctgtgccttcagccaaatccgctaaagcaaccgcgacgttatccagcgcatggatcttgatgtattgcatatcaaccccagaccttagttcagttcaatggcgaagtagtcacgcgcattgttaaagcaaatatttttcaccatctcgcccagcaggttgatgtccgccggtgcttcgcctgcttccacccagcgaccgatcatctggcacagaatgcggcggaagtattcgtgacgggtgtatgacaggaagctacggctgtcagtcagcatgccgacaaagcggctcagcagaccgagctgcgccagttgggtcatctgacgttccataccgtctttctggtcgttaaaccaccagccggaaccgaactgcattttgcccggcataccttcgccctggaagttaccgatcatggtgcccagcacttcgttatcgcgcgggttcaggcagtagagaatggttttcggcagcaggttttcttcattctgcttgctcagcagcttagacagctcttccgccatcggacggtcgttgatggagtcaaagccgacatccggccccagcagtttaaactgacgcaggttgttattacgcagtgcgccaatgtggtactgctgtacccagccgcgacgtgcatattcggcaccaaggaacaccagcaccgcagttttgaactgtgccacttcgtgctcgctcagggtttcgcctgccagacggcgcgcgaggatgctgtccagttccgcttcgttcgcttcagcaaacatcaccacatccagcgcgtggtcagacactttacagccgtgagcggcgaagtgatccagacgtttagtcagggcagtttgcaggtcagcaaagcggcgaatgtcggtatcggaaacttcgcccagcttcgccatgtagtcgttaaaggtcgcctgttcaatgttaaaggctttgtccggacgccagctcggcagcactttaatggtgaaagagccgtctttggcgatctctgcgtgatgctccagagaatcgatcgggtcatcggtggtgccgaccattttcacgttcatctgctgcatgatgccgcgtgcagagaaattatcctgcgccagcagttcgttacattcgttccagatttcatcggcagttgacggagaaagcaatttgccagtgataccaaacggacgacgcagttcgaggtgcgtccagtggtataacgggttgccgatagtgtgcggaacagtcgccgcccaggcgtcaaatttttcacggtcagacgcatcaccggtgcacaaacgctcggccacaccgttggtacgcatagcgcgccatttgtagtgatcgcccttcaaccagatgtcatacaggtttttaaaacgatagtcttccgcaatctgctgcggcggcaaatggcaatggtaatcgaaaatcggctggtcttttgcgtagtcgtgatacagacggcgggcaaattcagtatctaacaggaaatcttcagtcataaacggagtcattttcgtcttcctctcaacgagtgagctagcttgcttatggtgcgatgctgacaaagttatcacaccaatttccagagtccgaagatattttcgtgagttagatcaataaacgtagttaaaaaaattactctcaaagtggtaaatctcgctgcaggccgcgccagtactggcctcgccgtcgtcaggtaatgtccctacaaatattcgcacatttgtgatggctctcaccttttaaagttgtatgacaagttatctttctgccgtcgcaaatcataagtcgacggaatgcaaattgccgattcattcatttgttagatgaatcgggttaaccggtacggaagccgaattagcacgaaactttcatggcaacgttcggggcgtgccggttttttttcggttacccggtcgtaactaacatcttcagcctctggcgggatgatggccgcgcttcctgcggatataacaaaacgatgaggttttacatgcgtaaaattaaagggttacgttggtatatgatcgcactggtgacgctcggcaccgtgcttggttacctgacgcgtaacactgtggcggcagctgcgccaactctgatggaagagttaaacatctccacccaacagtattcctatatcatcgcagcgtattctgctgcttatacggtcatgcaaccggtagcgggttatgtactggatgtgctgggtacgaaaatcggttatgcaatgtttgctgtactgtgggccgtgttctgtggtgcaactgcgctggcaggtagttggggtggcctggcggttgctcgtggtgcggtcggtgccgcggaagccgcgatgattccggcgggtctgaaagccagctccgaatggttcccggcgaaagagcgttccatcgcggtaggttactttaacgtaggttcttcgattggtgcgatgattgcgccgccgctggtggtatgggcaatcgtgatgcacagctggcagatggcatttatcatctccggtgcgttgagctttatctgggcgatggcatggctgattttctataaacatccgcgcgaccagaaacatctgaccgatgaagaacgcgactacattattaatggtcaggaagcccagcaccaggttgacacagtgaagaaaatgtccgttggtcagatcctgcgtaaccgtcagttctggggtatcgcgctgccgcgattcctggcagaaccggcatggggtacttttaacgcgtggatcccgctgttcatgtttaaagtttacggctttaacctgaaagagatcgcgatgtttgcctggatgccgatgctgtttgctgacctcggttgtatcctcggtggttacctgccaccactgttccagcgttggtttggtgtgaacctgatcgtttcccgtaagatggtcgtaacgctgggtgctgtgctgatgattggcccgggtatgatcggtctgttcaccaacccgtatgtcgcgattatgctgctgtgtatcggtggttttgctcaccaggcactgtctggcgcactgattacgctctcttctgacgtgttcggtcgtaacgaagtggcgacggcgaacggtttaaccgggatgtccgcatggctggcaagtacgctgtttgcactggtagtcggtgcactggctgacaccatcggcttcagcccgctgttcgcagttctggcagtgttcgacctgttaggtgcgctggttatctggaccgtgttgcagaacaaaccggcgattgaggtggcgcaggaatcacataacgatcccgcaccgcaacattaaggcttcgtgtaagttttagtttcccttcaaagccgccttctcaggcggctttttcatcactgcgagtagagctaaactcgcaaaagtggtataacaaatatagtctgccgtatcatgcctggagcgcatatggaaatcactgaaccacgccgtttgtatcaacaacttgccgctgacctgaaagagcgcatcgaacagggcgtctatctggtgggtgataaactgcctgccgaacgctttattgccgatgaaaaaaacgtcagccgcaccgtggttcgtgaagccatcatcatgctggaagttgaaggctatgtcgaagtgcgtaaaggttcaggtattcatgtggtttccaaccagccgcgccatcagcaggcggctgacaataatatggaattcgccaattacggtccgtttgagttgctccaggctcgccagctcatcgaaagtaatattgccgagttcgcggcaactcaggtcacaaaacaggacatcatgaaattgatggccattcaggagcaggcacgcggtgaacaatgcttccgtgattccgagtgggatttgcagttccatattcaggtagccctggcgacgcagaactccgccctggcggctatcgttgaaaaaatgtggacccagcgtagtcataacccgtactggaaaaaactgcacgaacacattgatgcccgtaccgtcgataactggtgtgatgaccacgatcaaatcctcaaggcgctgattcgcaaagatcctcatgctgctaagctggcaatgtggcagcacctggaaaacaccaagatcatgttatttaacgaaaccagcgacgatttcgagttcaatgccgaccgctatctgttcgccgaaaacccggtggtgcatctcgatacagccaccagcggcagtaaatgaaattcctgtccgacaggcgctacagtgcgcctgtttgtctcgtcggtaagcgaaaagtataaagtgtcagcctgtgtaaatcctctcgcctccctcccctgcattcagcaaaatcagactccacggacatgtaattttgataacgaacaacgttgacctttgttacaattagattcaatttgaatttatgcttttgaatgctttcttatctcacgatttaacagggaatagttcaggctgtgttgatgtatcaaacccgcagaacataccaagacagcaataacattgcggtagtgcatcatttaaaaccagcgtggcgttaaccgattcaccaggaataatgaatggaacttttgacccaattgctgcaagccctgtgggcgcaggattttgaaaccctggccaatccgtcgatgattggcatgttgtattttgtcttgtttgtcattttgttccttgaaaacggcttgcttccggcggcctttttaccgggcgacagtttactggtactggtcggcgtattgattgcgaaaggcgcgatgggctatccgcaaacgattctgctgctgaccgttgccgccagcctcggttgctgggtcagctatattcaggggcgatggctgggcaatacccgcaccgtacaaaactggctatctcatttacccgcgcattatcatcaacgcgcacaccatctttttcataaacacggtttatcggcgctgttaattggtcgctttattgcgtttgtcagaacactgctgccgacgattgccgggttatcagggctgaataacgcgcgctttcagttcttcaactggatgagtggtctgctgtgggtgttgatcctgacaactctgggttacatgctcggcaaaacgccggtatttttaaagtacgaggaccagctgatgtcatgcctgatgctgctcccggtggtgctgctggtgtttggcctggcaggttctctggtcgtgttatggaaaaagaaatatggaaatcgggggtaagggatgcaaatacctcgcatgtcacttcgccagctagcctggtccggcgctgttttacttctggtcagcacactattgctggcctggtccgcggttcgccagcaagagtctacgctggcgattcgtgccgttcatcaagggacaacgatgccagacggtttttcaatctggcatcaccttgacgctcacggcattcctttcaaaagtatcacccccaaaaacgacactctgttaattacctttgactccagcgaccagagcgccgccgcaaaagcggtcctcgacagaacattgccccatggctacatcattgcgcagcaggacaataacagtcaggctatgcagtggctgacccggttgcgggataactctcatcgcttcggataacttcctgttatccgaaacagatcactcactttggtgatttcaccgtaactgtctatgattaatgaggcggtggttaacacgaccgcttcgttgtctggacaatcgttcctttgtaataggtccgaatcacaatggaaggttcaagaatgaaataccgcatcgctttagctgtttctctctttgctcttagtgccggtagttatgccactaccctgtgtcaggaaaaggagcaaaatatccttaaggagatcagctatgccgaaaaacaccaaaaccagaatcgtattgacggtctgaataaagccctgagtgaagtccgggccaactgttcagatagccaactgcgtgccgatcatcagaagaaaatcgcaaagcagaaagatgaggtggcggaacgccagcaagatttagccgaggcgaagcaaaaaggcgatgcagataagattgccaaacgcgaacggaaactggcagaagcgcaggaagagctgaaaaagctgaaagcgcgcgactactaactcacaatagtcactacttactcacctggagaaaactatgtcgaaagaacacactacggaacatctgcgtgctgagttgaaatccctttccgatacgctggaagaggtgcttagctcatctggcgagaagtcaaaagaagagttgagtaagattcgtagcaaagcggagcaggcactgaaacagagccgttatcgcctgggtgaaaccggtgatgccattgccaaacaaacccgtgtcgcggcggcgcgtgccgatgagtatgtgcgtgaaaatccgtggacgggcgtgggcattggcgcagcaatcggtgtagtgctcggcgttctgctgtcgcgtcgttaattatggcggacactcatcacgcgcaagggcccggtaaaagcgttctgggcatcgggcagcgaattgtttccatcatggttgaaatggtggagacacgtctgcggctggcggtggtggagctggaagaggaaaaagcgaatctctttcaacttttactgatgctgggcctgacgatgcttttcgctgcatttggtcttatgagcctgatggtgctaattatctgggcggttgatccgcaacatcgcctgaatgcgatgattgccaccaccgtggtgttgctgctactggcactgattggcggcatctggacgttacgtaaatcgcgtaagtctacgttgctgcgccacacgcgccatgagctggcaaacgatcggcagctgctcgaggaggagtcccgtgagcagtaaagtcgaacgtgaacgacgtaaggcgcaactgcttagccagatccagcaacaacggctggatctttccgccagtcgtcgtgaatggctggaggcaacaggcgcttacgatcgtcgctggaatatgctgttgagtctgcgctcctgggcgctggttggcagtagcgtgatggctatctggacgattcgccatcctaatatgctggtccgctgggccagacgcggttttggtgtatggagcgcctggcgtctggtgaaaacaaccctcaagcaacaacagcttcgcggttaacttcctctctggccggagaaattccggccttatccctcaaattttttgaaaatatttgacagttttccttgctaacaatcacgcttcgtcacgtttatgattctctccatcgacagcaacgacgctaatagcgcgcccttgcacaaaaaaacaatcagcagcctgagcggcgcagtggagagtatgatgaaaaaattagaagatgttggtgtactggtagcgcgtattttaatgccgattctgtttattacggcaggctggggaaaaattactggctacgcgggtacccaacaatatatggaagcaatgggcgtccccggctttatgctgccgctggtgattctgcttgagtttggtggtggtctggcaatcctgttcggtttcctgacacgtaccacagccctgtttactactggctttacgctgctgacggcatttttatttcacagcaactttgcagaaggcatgaactcgctgatgtttatgaaaaacctgactatttctggcggattcctgctgctggcaattaccggtccaggcgcattcagcatcgaccgcctgctgaataaaaagtggtaagcacgcgctatacttaacgataaaaaacgagggggaagctcctcgtttttgctattggaggatagaaaaatgggtcaactgattgacggcgtctggcatgacacctggtacgataccaaatccaccggcggtaaatttcaacgttcagcttccgcatttcgtaactggctcactgccgatggcgcgccaggccccactggcaaaggcggttttgccgcagagaaagatcgttatcatctctatgtttcactcgcctgcccgtgggcacaccgcacgctgatcatgcgtaagctcaaaggactggaaccgtttatttccgtttccgtagtgaacccgctgatgctggaaaacggctggacctttgatgacagttttccgggagcaaccggcgacacactctatcaacatgaatttctgtatcagctttatctccacgccgatccacactacagcggacgagttactgttcccgtgctgtgggacaaaaaaaaccacaccatcgtcagcaacgaatcagcagaaatcatacgcatgttcaataccgcgtttgatgcgctgggtgcgaaagctggagattactacccaccagccctgcaactgaaaattgacgaacttaacggctggatttacgacaccgttaacaatggcgtgtataaagccggttttgccaccagccagcaagcctacgacgaggcggtggcgaaagtgtttaaatcgctggcgcgactggaacagattttaggtcagcaccgttacctgaccggcaaccagctaaccgaagccgatattcgcctgtggaccacgctggtgcgttttgatccagtgtatgtgacccacttcaagtgtgataagcaccgcatcagcgattacctgaatctgtatggcttcctgcgcgatatctaccagatgccgggaattgccgaaacagtcaatttcgatcacatccgtaatcattacttccgcagccataagaccatcaaccctacgggaattatttcaattggtccgtggcaggatctcgatgaaccgcatggacgagatgttcgcttcggttaaaaaaaggcaccttacgaggtgcctctgataattagctaagtacgtgttgttcatgtcggatgcggcgtaaacgccttatcaaacctacaaaacatttatattcaatatgttgcaatgaccgcgcaggccagataagcgtagcgcatctggcaattttgcgcttgcccttatccttcacagcgccttattaattcatcgcgataatatttactgccatttcattcacgtctattcttaatttgctgctttaaaaacaagtgattgagcaaaattgaggcaaaaatggactggtatctgaaagtactaaaaaattatgtcggtttccggggtcgtgcgcggcgcaaagagtactggatgtttattctggtcaacatcatctttacgttcgtgctggggctactggataaaatgttaggctggcaacgtgccggtggcgaaggcatcctgacgacaatctacggtattctggtgtttttaccatggtgggcagttcagttccgccgcctgcacgacaccgaccgctcggcgtggtgggcactgctattcttaatcccgttcatcggctggcttattatcatcgtctttaactgccaggcgggtacgccaggcgaaaaccgctttggaccagatccgaaactggaacaagactaataattaagcaccttgtaaaaggtgcttaatcgattattttccgctaaaaagtttgggaatttcccgcagacaccaggatttcgcctcccccatactgtcacgacgccaggccataataatatcgatctcgctggtcgattccgggctgacgacacgcaaccgcccttccgcaatatctttttcgaccatcggatacggcatcgtcgccacgccaagccccgccagtaatgcctgacgtttatcttcaatcgtgctcaccgttaagcgcggctgtttgtccagcaactgtacggtcaacaccgggcgctcacgagcggtatccgccaccgcaattccacgatatttcacgcgcgtcacttcagataacggttccggctcctgatgaatcgggtgatccggcgcggcaacatagacgttcattaaggtatagagtttgcgcgagttgatctccgacgaggaacgaaaatgcatatccggcgcgataacgatatccgcccgcccctgctccagccgttcccacgcccccgccagcacttcggtgatgattgccagttgggtattggcttttgccgccagtttgtcgattaacgggaaaaaggcaggtgtcggtaccagcgcctcggtcacaatggtgagatgcgtttcccaaccgcgcgcgagggcttccgcatcggtagtcagtttatctgcggcttccagcaaaacgcgccctcgttccagcaacatcctcccgacattggtgaatttggtgcgatggcccgagcggtcaaacagcaccacatccagctcttcttccagtttttgcatggtgtagctaagtgcggaaggcacgcgtcccagctcatccgccgccgccgcaaaactgccccggcgatcgatcgcatccataacccgtagtgcttccagcgttaatgccctttctttggccatttcgttctcattcaggaaatttgaacataccgggcagaatatctggctaacaatgtagcgtccagccccttaccataaaaggaagtaaagagaggtcaagaattatgattactacccgaactgccaggcagtgtggacaagcagactacggatggttgcaggcccggtatactttttcctttggacactacttcgacccgaaattgttaggctatgcctccctgcgcgtgcttaaccaggaagtgctggccccaggtgccgcctttcagccgcgaacctatcccaaagtcgatattttaaatgtgattctggatggagaagctgagtatcgcgacagcgaaggcaatcatgttcaggccagcactggtgaggtgttgctgctctctacccagccgggtgtcagctatagcgaacacaatctcagcaaagacaaaccgttaacgcgaatgcaactttggctggatgcctgcccgcagcgagagaatccgctgattcaaaagctggcgcttaatatgagcaagcagcaattaatcgcctcgccagaaggtgggatgggaagcctgctattgcgccagcaagtgtggctgcaccatatcgtgctcgacaaaggcgaaagtgcgaatttccagttgcatgggccacgcgcgtatttgcaatcgattcacgggaaatttcatgcgcttacgcatcatgaagagaaagcggcgctaacctgcggtgatggggcgtttattcgtgacgaggctaacattacgctggttgccgattccccactgcgcgctttgctgatagatttgcctgtctagttgtttttacagggagatgatgatgagtaaaaaatcggccaaaaagcgccagccagtgaagcccgtggtggcgaaagaacctgctcgtaccgccaaaaattttggctatgaagagatgttgagcgagctggaagccatcgtcgcggatgctgaaacgcgtttagccgaagatgaagctaccgcgtaaagacaagttgccggatgcggcgtaaacgccttatccggcctacaaaacccaacaacatcaacaaattgtgcaattcgtaggccagataagacgcgccagcatcgcatccggcacaatacccaaaaccgggcgtttatctggccttgctcgccataatctcgataatctgccgatccgtttgctgcatcgaatggcttgctaacgcacacaggttggcaatcgactgctcaacatcatgcgccacaatcccttcattaccggttacggcggtatcatccagcgccattaacaccgctttccacgcagccgaagcactggtcgaaaccttcatcgcgcagctgttcgacgcaccatcgcaaatcatgccgctgacatcgccgatcatactgctgatcgccatcgaaatggtttcataacgcccatccaccagccatgccatcccggcggcggcccccattgctgcggtcgttgcggcacaaagcgcagacaaacgcggtaactggttatggatgtaaatcgcgctcaaatgcgaaagcatcagcgcacgcgccagccgttcatcatccgctccgaagtgttctgctaccaccaccacaggcattgttgcggtgatcccttggttacccgagccggagttactcattgccggaagcgtagcgccgcccatacgcgcatcggatgccgcgctggtacgaatcacaatggatgaagagagatctttcgccagcaaaccgcgcgcgcactgtttttccagcgtcgcaccaatatgcagcccccagttaccgctcaaaccttcctgcgataacgcacaatttaacttcgcagaatcgagaataaagcggatcgccgcaaacgggacttcattgacgaacttcaggatctcagccagcgtcgtcctggaaagcaccgtcagcggcgactcttgctcgccctctgtcacacacgcctgctgggtaaacaccacaccattgtgcgtctcaatatgcacaatgttggtatgcccgccgacaatggtgacacacgcccacttctcaccgttccagactttggcgcgtgagaagaggatttcatcgcaaggttcctggatcttaactgagactttccccgccgccagcagtgctttggcatcggcaattgcctgcgcagttgcatctttcagcacttccagcccggcgttagcatttccacctaacgctcccagcgccgccgcaatcggcagccccaccattcccgtgccgggaacggtgacgcccagaccgttcttcatcagatttggcgaaacccaggcttctacacgttcaaccggaccttccagttcagccgcagcaaccgccgccgccagcgccagtgaaatcggttcagtacaccccagcgccggttttacctcctcctgaacggcgaggatgtaacgctgccataacggatttaaagtcgaatcaaacatattaaaaaccttaaaatttcaggtaaatcaagaaaatgccaggaacggagaaacacaaagcaacaaaccagtgacgataatcaggtacagagacatccctttgtatttgtgcaatgccggtactttgtaaaccagccacgccgggatcaggcaccctaccatgccgaaaatcgggctacagatagaggtgaagctcaacaccggggcgttcagtacgatggcgctccaggccagcaaaatggcgaaaatcatgatgccgcgctgaacgagattttcgttaatcttctcggcaggtatcttgcgacgcaggatgttcattacgatcccttgcgttgcttcgcgaaagcctaaatagacgccaaagaatgcagtcattacagcaaagatattgagaatgacgctgaccactttcacccacgctgcgccgtcaccgctaataaactgtgcggcaatcgccaacgcggaaatattctgctcgtaggcttttaccgcttcgtcatgtcccatcgccagcgtgaacgacacggcgtagaaaaagacggtgacaaacaaaatgccaaacgcgatattcattgcccgcaatgctttatgccgcgccacttcaattgatttttcccgcgagcgataagagatcaccatcgggcttaacgtctggataaacagaatcgacgtcagggtaaacggcagcgtaataatggcgtttttcaccagcagccccagcggcggtagcgaaccgacgttatacagatgccacattcccaccatcgacacgcccagcgccgcgaccaccagcagcttggtcagcaccatgccggtcgaaattttgaataacaatttctcgccgcgtgaagagatcgccaccagaatgcaaatcagtaccagaccataaaagggactgtctgacagcaacccttccgtcacgccgaaggtatgcagataggaagcactatcgttggtgatggcggtggaatagacgaacatccaaatcaccagcattacgaaatagagcgcacctaacaggatgccccagtttttacctaaataaccgctaatgacgctcgggtaatctttacattctggtgattctgccagcgtattaataaacaatcgctgaaacagatacattgccgggtaaccaatcaccgatgagagcaaaaatacccacaatcccatcaaaccgacctgcaccgggagaaaaacaatccccgcgccaatcgccatcccgatactcataatcacccagccggtgtcagtactgtcgaatttgatcgcttctcgccactcgctctcactcattccagcacgacccgccggggtcgaagcgtctgcaatgacgcctttattcgatgcaatttccataatttctcgctcaatattttgtagggcttattatttttttccgagccgcatcaaggcgatatgcggtctacgtttttgcaggcgagttattagaataaagaaatgatacgcgcgaggtcagagaaaatcttcacaatcaagactttgaaatagcaattgtgggtaataattttctattaaattgagttaatggaaataattattctctatttgcggcagatcacaataaaaaagggtgcacattttgtgcacccaaggatgaaagctgacagcaatgtcagccgcagaccactttaatagccagtcctccgcgtgatgtttcgcggtatttatcgttcatatctttgccggtttcatacatcgtctcgatcactttatcgagtgaaacacgcggtgccgaggtgcggcgcatcgccatccgcgcggcgtttactgctttcacggcattaatggcattacgttcaatgcacgggatttgtacctgtccggcaaccggatcgcaggtcagcccaaggttatgctccatcgcgatttccgccgcattgcatacctgcgccggactgccgcccagtagttcagttaaccctgccgccgccattgaacaggccacgccaatctccccctgacagccgacttccgcgccagagatggaggcgttcattttatacagcgcgccaatagcccccgctgccagaaaatagcgggcaattgaccgctcgtttaccggacgacggaacttatcgtaataagccagcactgccggaataatgccgcacgcaccgttagtcggtgccgttaccacgcgcccgccagctgcgttttcttcactaaccgctagcgcgtacatgttgatccagtcgatgacattcatcggatcgttagagatgttatcgctggaaaccagttgacgacgcagcgctacggcacggcgcggcacattgagcggaccaggcagcacgccttcagtattcattccacgttcaataccgtcatgcatcacttgccagatacgggcaaaccctgcgtcaatttccgctttactgcgcagcgccagctcgttgtgcatcatcaggccagatatagacaggccgttgtaatcacacattttcagcagttcacctgctgagtggaaatcgtaaggtacgggtgtttcgacatcgtacgacaggccgaagtgttcttcttcgacaataaacccgccgccgacagagtaataggttttgcttaatagctcttcctgtcccttccaggcagtgatccgcattccgttctcatggcgaggcaacatttcgggatggaagataatgttctttgctacaggaaaatcaacaatatgcgcgccagaagtcaccggcaaccgcccgctgcgcgtcactaactctataaatgcagggatctcatcaatgacaacatcctgcggactgtttcctgccagtcccatgatgatggcgacatccgtggcatggcctttgcccgtcagtgacaacgacccgtacagatcgaccacaatatggctcgtcgcggttaataagccgctactttccagccgatcaataaaactttttccggcattcattggccccacagtatgcgaactggagggaccaatcccaattttgaaaatatcgaatgcactaatcatatccacaccctcggattgccgttcagtaaagtggagcggaacgaccttgcgaccgtcccgctcacgaggccttacgcactacgtactgcgatggcttcaatttccaacttcacatctttcggcaaacgcgcgacctgcacacagctccgggtcgggtaggtcgcctgatgttcatcgaagaactgcttatagacttcattgatggtggcaaaatcattcagatcggtgatgaacacggtcatcttgatgatatcgcccacactcagtccggcagcaaccacgatcgctttgacgttttcgaggcttaaacgcgcctgatcttgcacatcagccgggatctcaccggtctgtgggcaaaccggaatttgcccggaggtgaagaccatgctgcctaaatcaacgccctgaacataagggccgattgcgcctggggcacgttgcgtttcgataatctttttcatacatcctccggcgtcagagcgcctgggtaaaggtacgtgaaataacatcctgttgctgttcacgggtcagtgcgttgaagcgcacggcgtagccagagacacggattgtcaggttaggatatttttccgggtgctcgatggcatccagcagcatttcccgattcattacgttgacgttgaggtgttgaccgccttcgacatccgcttcgtggtggaaatacccatccagcaggccgacaaggttcgttttacgtatcggatcttctttgcccagcgccgcagggacgatggagaaggtgtacgagatcccatctttggcgtaggtgaatggcagtttcgccaccgacgtcaatgaggctacggcgcctttgcgatcacgaccgtgcatcgggttagcgcccggcgcgaacggtgttccggcgcggcgaccgtccggcgtgttcccggttttctgaccgtacaccacgttagaggtgatagtcagaatcgattgggtcggcacagcattgcgataggttggcaaagctttaattttcttcataaagcgttcaaccagatcgcaggcaatgctgtctacgcgctcgtcgttgttgccatactgcggatattcgccgtcaatctcgaaatccaccgccaggccgttttcatcacggattggtttcacacgagcatatttgatggcagacagggagtccgttgccaccgacaggcccgcgatgccgcacgccatggtgcgatagacatcacgatcatgtagcgccatcagcgaagcttcgtagctgtacttgtcgtgcatgtagtgaatgatattcagcgcgctgatgtactgtaccgccagccagtccatgaagtggtcgaggctatccatcactttgtcgtagtccagcacgtcatccatcaacggagccgttttcgggccaacctgaatcttcagcttctcgtccattccgccgttgattgcgtacagtagcgttttcgccaggttagcgcgtgctccaaagaactgcatttgcttaccaatcaccattgggctgacgcaacaggcaatcgcgtaatcgtcgctattgaagtcagtacgcatcagatcgtcgttttcatactgcaaagaggatgtgacgatagacacctgcgcggcatattttttgaaggcaatcggcaaggcttccgaccacagaatagtcaggttaggttccggtgcaggccccatagtgtgcagggtgtgcaaatagcggaaggagtttttggtcaccagggttcgaccgtccagccccatcccgccgatcacttccgtcgcccagatcgggtcgccggagaacagcgaatcaaattccggcgtacgcaagaagcgcaccatacggatcttcatgatgaagtggtcgatcagttcctgtgcctgctgctcattgagtacgcctgctttaaagtcgcgctcaatgtagatatcgaggaacgatgccgtgcgccccagcgacatcgcgccgccattttgcgatttcactgccgccaggtaagcgaagtagagccactgcaccgcttcctgtgcattctgcgccggacgggagatgtcaaaaccgtatttcgccgccatttcttgaatctgcaacagcgcacgacgatgttccgccagctcctcacgcagacggagcgtagcttcgagatcttcgcctttttccagacgggactggagatcggcaaactgcagttcgcgttcacgtaccagataactgatgccgtaaagcgccacgcggcggtagtcaccgatgatacgcccacgaccataaccatctggtaaaccggtcagtacaccagatttacggcagcgcagcatatccggtgagtaaacatcaaatacgccctggttatgggttttacgcagatcggtaaagatgtattcaaattcgctatccatttcacgaccatacgcgtggaatgaacttctaatcatattaatgccgccgaacggatgcagtgcacgctttaatggcgcatccgtttgcagacccactattttttccagcggctggtcaatatatcctgcatcatgagcggtaattgtggtggcaatattggtatcgaaatccaatggcgcgtgagtcgcattttcgatacggatgccttccatgactttttcccacaattccgtggtggcaggcgtcgcttcggcgagaaaagattcatcgccttcataaggtgtatagttatgttgaataaaatcgcggacattaatttcgtttttccagtccgtacctttaaagccaagccatgcgtcggcgtacagcttatcgctggtatcaatatctaccttcatgaaaaataatctctctacaatacttcaactaaattatgcaaattctgcgggcgcgttcactttgcctaaatgaatggcatccaaagcaatcattttttcttcgttagtcggaattacggcgcaaatgacacgcgcattttcactggaaacaattcgctctccaaaagagttagagcgattattcatttctgtatcaatctctacgcctaatacagctaaatgttccatgaccagacgacgaattaaacttgaattctctcctattccgccggtgaatataattccatccaggcgatgtaatgaagcagcgtgtccggcaatatgacgggcaattcggtgaacaaaggttttaattgccagttgcgcgcgttcgtgaccttcatgccaggctttttccagaacacgtaaatccgaagaaaggccggaaatacctaataatcccgactctttattcactacgcgttccaggtcccccaggctctggttggtttggctggcgacccaggacatcgccccgaagtcgacatcaccactgcgggtacccatcatcaagccttccagcggcgtcattcccatggaagtgtcaacactctgaccgttgcgaaccgcgcagattgacgcgccattgccaagatgcgccacaaccaggccggagtcatcttccgccagattcagcagagaatgcgcgcgctgggaaacatagcggtgcgacgtgccgtggaaaccataacggcgtacacctaactcttcataatatttccacggcaggccgtataaataagcttccggagccatcgtctggtggaaactggtatcaaataccgccacctgagttacgcccgggaataattgctgcgccgattcaataccacttaaattggcgtaattatgcaggggtgccagtggagaaacgcgacggatattatcaatgacttcatcggtaataatggcggactcggtaaaaatactgccgccgtgagcgatgcggtggccaattaaggccacattgtcatttaaattccgtttttccagttcaaatgcaattgccttcaatgcaccttcgtagctgtggtgagccagcggtgctggctctcccccatttacggataagaatgcattttccgagttaataccgtcggcaatacctgacattaatacttcacagtcgctggcattgagtacggaaaacttaatcgaagacgaaccacagttaataaccaaaacaaccggaaattcattcatctcttttctcatcctgagttacggattaaaacagtttgtatacgatgttcaggatggtcagcagaccaatcacggtaacaaacacgttatccagacgaccacggtatttcgccagagacggcgctttacggatggcatacatcggcaacaggcacagcagtgatgcgataatcggtgcgcccatggcttcaatcaggtcgaggatgttcgggttggcgtaggcaacaacccaggtggagcccataatgaaaatcatgctgatagtattcagtttacccagcgacactttggttttgtcacctttataaccgaacttcagaatcaaaccattcagcccttccagcgtccccagatagtgaccgaagaaagatttgaaaatagccacgagtgcgatgatggaagcggcatattccagtgtaatcgcaaacgttgttttggtaccggtcatggacgcaaagtggttagccagataagaaagcactggaatattctgcgctttcgcttcagccatattcgccggagacagcgtaaacaggcagctaaaggcaaagaacatcaccactgcaaccatcagcatactggcgcgagagatgatttgtgaacatttacgctcggtgaagtcgcgaccaaaatctttctcgtactcttcacgtttagaaaccacgaaggaagagacgattggcgagaagttaaaggagaaaaccatgatggaaatccccagccagacggtgatcaggataccgtcatgaccagttaacgacagcgaaccgaggtcaacctggtcgataactgcagagttccagtaagggatcagcgaaagagaaatcagcaccaggctggcgataaacggccataccagatagctcatcactttaaccatcagatccttaccaaaccagatgacgaaagccatcagcagcaacaggaacagcgccacaaagccgcgattcagcggtgcaaagccgagctggttttcccagaacgtcataaaggtattggtaatagtaacgccataaatccacaacagtgggcaaatcgcgaagaagtacaggaacgtgataaccacgccgccagttttaccaaaatgctcttccaccgtttccgtaatgttgccggaagggttagagccagaaagacacagacgcgccagtgcccggtggcaataaaacgcgatggggtatgctaataccaacatcagaagaatcgggatcagtccgccaaaacctgcgcggatagggaagaacagcaccccggcgccgattgccgtaccaaacaagcctaacgtccatgtggtatctgatttacgccaggacgattgttttgtctggctggatacaatgctatctgaagtactcatatcctatcctcaacgaattaattaagcgtcaacgaaaccggtgatttgagagacgcgagaaagatcgatattgccgccggaaataatactgacggtttttctgttttgaatatattggtctaatttaccgcttaataatgcagcacatgccagagcgcctgcgccttcggtgacgactttattgcgctgaattaaggcaatcatactgtttctgatttcgtcttcgctgaccagcacgatgtcatcgactaattcacgaacgatttcgtaagttaaattacccgggcgggagacatcacaaccatccgccagggtgccggtagttcggtgcgtagttatttctccggagtggaaagaagccgccatgccgtgaacgttttcagactgtacgccaataacacggatggtcgggttgatagatttaattgccaccgcaatacctgcaattaaaccgccgccgccaattggcacaatcacgttatcgacatcatagagatcttccataatttccagaccaatcgttccctggccagcaatcactttcggatcatcgtaaggtgggataaaaatacggccttccatttcgacaatttcgctcactttagcaatagtgtcgttgaagttatcaccatgcaaaacgacttctgcggagtagtcgcacgttgccgcgactttggatttcggcgcaccttttggcatcaccactttaccgtcaatacccagcatcgcgcaggagagcgaaaccccttgcgcatggttgcccgcagagcaggccactacacctttacgtttttccgcatcagtcagtgaacttaatttattaaatgcgccacgaattttaaatgaaccggtacgctgcatgttttcgaatttgaggaatatttcacctttgcaacgttcactaaaatagttggagcgaggcatacctgttttataaattcgcccagccagtcgttgttttgcttcaatgatgtcatcaatagcaaccgggagatcgtatgtaatatgcattataaaacctcttagcctgaattaaatatgtaggtaaccgtaaccgacacctgcaaaacagacaggtggattatttatgtttaaattaaaacaaataactaatcaacttcaattaattgccttcgtctacacccattataagatgaatactctttggctaattccaccaaaaccgatgctgcttttttaatacgataatttttcgaccataccgcggcatattgtgccacaggtaatgtttcttcaaccggaatagtaataaattgattagaaccaaaaggtgatgtcatatcacaaggaattacagttaagaaatcagcattgagaacaagattataaattgtcacgactgagtcggttttaacgatgttttcaatactgatgccatttctttgtaacgtagtaagtagttcgctgtagtaccccatattggtttgtggcaacacccactgttcgttcttcaacgac
